(19) United States
(12) Patent Application Publication
(10) Pub. No.: US 2022/0323497 A1
(43) Pub. Date: Oct. 13, 2022

(54) CELLS EXPRESSING CHIMERIC ANTIGEN RECEPTORS AND CHIMERIC STIMULATING RECEPTORS AND USES THEREOF

(71) Applicant: Eureka Therapeutics, Inc., Emeryville, CA (US)

(72) Inventors: Hongruo YUN, Emeryville, CA (US); Jun Cui, Emeryville, CA (US); Pengbo Zhang, Emeryville, CA (US); Yiyang Xu, Emeryville, CA (US); Lucas Horan, Emeryville, CA (US); Shaohua Xu, Emeryville, CA (US); Guangyan Xiong, Emeryville, CA (US); Shan Li, Emeryville, CA (US); Yixiang Xu, Emeryville, CA (US); Bradley Austin Heller, Emeryville, CA (US); Hongbing Zhang, Emeryville, CA (US); Hong Liu, Emeryville, CA (US)

(21) Appl. No.: 17/628,120

(22) PCT Filed: Jul. 24, 2020
(86) PCT No.: PCT/US2020/043629

§ 371 Date: Jan. 18, 2022

Related U.S. Application Data
(60) Provisional application No. 62/878,271, filed on Jul. 24, 2019.
(60) Provisional application No. 62/879,629, filed on Jul. 29, 2019.
(60) Provisional application No. 62/953,758, filed on Dec. 26, 2019.

(51) Int. Cl. A61K 35/17; C12N 5/0783; C12N 15/62; C12N 15/86; C07K 14/725; C07K 14/705; A61P 35/00

(52) U.S. Cl. CPC A61K 35/17; C12N 5/0636; C12N 15/625; C12N 15/86; C07K 14/7051; C07K 14/70578; A61P 35/00; C12N 2740/15042; C12N 2501/2302; C07K 2319/03; C07K 2319/02

(57) ABSTRACT

Described herein are immune cells comprising: a chimeric antigen receptor (CAR) that comprises (i) an extracellular target-binding domain comprising an antibody moiety; (ii) a transmembrane domain; and (iii) a primary signaling domain, and a chimeric stimulating receptor (CSR) that comprises (i) a ligand-binding module that is capable of binding or interacting with a target ligand; (ii) a transmembrane domain; and (iii) a CD30 costimulatory domain, in which the CSR in the immune cells lacks a functional primary signaling domain. Also provided herein are methods of using the same or compositions thereof for therapeutic treatment of cancers (e.g., hematological cancers or solid tumor cancers).

### CROSS-REFERENCES TO RELATED APPLICATIONS

[0001] This application claims priority to U.S. Provisional Application No. 62/878,271, filed Jul. 24, 2019, U.S. Provisional Application No. 62/879,629, filed Jul. 29, 2019, and U.S. Provisional Application No. 62/953,758, filed Dec. 26, 2019, the disclosures of which are hereby incorporated by reference in their entirety for all purposes.

### BACKGROUND

[0002] Adoptive T cell immunotherapy, in which a patient's own T lymphocytes are engineered to express chimeric antigen receptors (CARs), has shown great promise in treating hematological malignancies, but not so much in solid tumors. In addition, CAR by itself is generally not efficacious enough, especially for solid tumors, even with the commonly used costimulatory fragments such as CD28 or 4-1BB, no matter if expressed in cis or in trans. Therefore, more efficacious and longer-lasting T cell immunotherapies are needed.

[0003] CD30 is a member of the TNF receptor superfamily of receptor proteins. Most of the homology between TNF receptor family members occurs in the extracellular domain, with little homology in the cytoplasmic domain. This suggested that different members of the TNF receptor family might utilize distinct signaling pathways. Consistent with this hypothesis, the TNF receptor type 1 and Fas have been shown to interact with a set of intracellular signaling molecules through a 65-amino acid domain termed a death domain, whereas the TNF receptor type 2 and CD40 have been found to associate with members of the tumor necrosis factor receptor-associated factor (TRAF) family of signal transducing molecules.

[0004] The membrane bound form of CD30 is a 120-kDa, 595-amino acid glycoprotein with a 188-amino acid cytoplasmic domain. Cross-linking of CD30 with either antibodies or with CD30 ligand produces a variety of effects in cells, including augmenting the proliferation of primary T cells following T cell receptor engagement and induction of the NF-kB transcription factor. CD30 was originally identified as an antigen expressed on the surface of Hodgkin's lymphoma cells. Subsequently, CD30 was shown to be expressed by lymphocytes with an activated phenotype, cells on the periphery of germinal centers, and CD45RO1 (memory) T cells. CD30 may also play a role in the development of T helper 2 type cells. The T cell activation properties of the TNF receptor family member 4-1BB have been shown to involve the specific ability of its cytoplasmic domain to associate with the tyrosine kinase p56lck. The sequence of the cytoplasmic domain of CD30 shows little sequence similarity to any of these receptors; CD30 lacks an obvious death domain or a p56lck-binding site.

### SUMMARY

[0005] The present invention provides, among other things, chimeric stimulating receptors (CSRs) that use a costimulatory domain from CD30 (also referred to herein as a CD30 costimulatory domain). As described in detail herein, T cells with CSRs containing a costimulatory domain from CD30 express far less PD-1, an inhibitor of T cell activation, than T cells with CSRs containing a costimulatory domain from, e.g., CD28 or 4-1BB, and at the same time demonstrate equal cytotoxic potential. In some embodiments, T cells with CSRs containing a costimulatory domain from CD30 express far less PD-1 than T cells with CSRs containing a costimulatory domain from Dap10. The examples suggest that the costimulatory domain from CD30 ameliorates the functional unresponsiveness that leads to T cell exhaustion, also called anergy, and subsequently, provides superior persistence of tumor cell killing and increased tumor infiltration as compared to the commonly used costimulatory domains such as CD28. It is unexpected since CD30 lacks a p56lck-binding site that is thought to be crucial for CSR costimulation.

[0006] In one aspect, the disclosure features an immune cell comprising: (a) a chimeric antigen receptor (CAR) comprising: (i) an extracellular target-binding domain comprising an antibody moiety (a CAR antibody moiety); (ii) a transmembrane domain (a CAR transmembrane domain); and (iii) a primary signaling domain, and (b) a chimeric stimulating receptor (CSR) comprising: (i) a ligand-binding module that is capable of binding or interacting with a target ligand; (ii) a transmembrane domain (a CSR transmembrane domain); and (iii) a CD30 costimulatory domain, wherein the CSR lacks a functional primary signaling domain.

[0007] In some embodiments, the CD30 costimulatory domain comprises a sequence that can bind to an intracellular TRAF signaling protein. In some embodiments, the sequence that can bind to an intracellular TRAF signaling protein corresponds to residues 561-573 or 578-586 of a full-length CD30 having the sequence of SEQ ID NO:65. In some embodiments, the CD30 costimulatory domain comprises a sequence that is at least 80%, 85%, 90%, 95%, or 100% (e.g., 80%, 81%, 82%, 83%, 84%, 85%, 86%, 87%, 88%, 89%, 90%, 91%, 92%, 93%, 94%, 95%, 96%, 97%, 98%, 99%, or 100%) identical to residues 561-573 or 578-586 of SEQ ID NO:65. In some embodiments, the CD30 costimulatory domain comprises a sequence that is at least 70%, 75%, 80%, 85%, 90%, 95%, or 100% (e.g., 70%, 71%, 72%, 73%, 74%, 75%, 76%, 77%, 78%, 79%, 80%, 81%, 82%, 83%, 84%, 85%, 86%, 87%, 88%, 89%, 90%, 91%, 92%, 93%, 94%, 95%, 96%, 97%, 98%, 99%, or 100%) identical to the sequence of SEQ ID NO:75.

[0008] In some embodiments of this aspect, the CSR comprises more than one CD30 costimulatory domain. In some embodiments, the CSR further comprises at least one costimulatory domain which comprises the intracellular sequence of a costimulatory molecule that is different from CD30. The costimulatory molecule that is different from CD30 can be selected from the group consisting of CD27, CD28, 4-1BB (CD137), OX40, CD40, PD-1, ICOS, lymphocyte function-associated antigen-1 (LFA-1), CD2, CD7, LIGHT, NKG2C, B7-H3, a ligand that specifically binds with CD83, and Dap10.

[0009] In some embodiments, the CAR further comprises a costimulatory domain (a CAR costimulatory domain). The CAR costimulatory domain can be derived from the intracellular domain of a costimulatory receptor. The costimulatory receptor can be selected from the group consisting of CD30, CD27, CD28, 4-1BB (CD137), OX40, CD40, PD-1, ICOS, lymphocyte function-associated antigen-1 (LFA-1), CD2, CD7, LIGHT, NKG2C, B7-H3, a ligand that specifically binds with CD83, and Dap10.

[0010] In some embodiments, the ligand-binding module of the CSR is derived from the extracellular domain of a receptor. In some embodiments, the ligand-binding module of the CSR comprises an antibody moiety (a CSR antibody moiety). The CSR antibody moiety can be a single chain antibody fragment. The CAR antibody moiety can be a single chain antibody fragment. In some embodiments, the CAR antibody moiety and/or the CSR antibody moiety is a single chain Fv (scFv), a single chain Fab, a single chain Fab′, a single domain antibody fragment, a single domain multispecific antibody, an intrabody, a nanobody, or a single chain immunokine. In some embodiments, the CAR antibody moiety and/or the CSR antibody moiety is a single domain multispecific antibody. In some embodiments, the single domain multispecific antibody is a single domain bispecific antibody. In some embodiments, the CAR antibody moiety and/or the CSR antibody moiety is a single chain Fv (scFv). In some embodiments, the scFv is a tandem scFv.

[0011] In some embodiments, the CAR antibody moiety and/or the CSR antibody moiety specifically binds to a disease-related antigen. The disease-related antigen is a cancer-related antigen. The disease-related antigen is a virus-related antigen. In some embodiments, the CAR antibody moiety and/or the CSR antibody moiety specifically binds to a cell surface antigen. The cell surface antigen can be selected from the group consisting of protein, carbohydrate, and lipid. The cell surface antigen can be CD19, CD20, CD22, CD47, CD158e, GPC3, ROR1, ROR2, BCMA, GPRC5D, FcRL5, MUC16, MCT4, PSMA, or a variant or mutant thereof.

[0012] In some embodiments, the CAR antibody moiety and the CSR antibody moiety specifically bind to the same antigen. In particular embodiments, the CAR antibody moiety and the CSR antibody moiety specifically bind to different epitopes on the same antigen.

[0013] In some embodiments, the CAR antibody moiety and/or the CSR antibody moiety specifically binds to a MHC-restricted antigen. In some embodiments, the MHC-restricted antigen is a complex comprising a peptide and an MHC protein, and the peptide is derived from a protein selected from the group consisting of WT-1, AFP, HPV16-E7, NY-ESO-1, PRAME, EBV-LMP2A, HIV-1, KRAS, FoxP3, Histone H3.3, PSA, and a variant or mutant thereof.

[0014] In some embodiments of this aspect, the CAR antibody moiety binds to CD19, and the ligand-binding module of the CSR binds to CD19. In some embodiments, the CAR antibody moiety binds to CD22, and the ligand-binding module of the CSR binds to CD22. In some embodiments, the CAR antibody moiety binds to CD20, and the ligand-binding module of the CSR binds to CD20. In some embodiments, the CAR antibody moiety binds to CD19, and the ligand-binding module of the CSR binds to CD22. In some embodiments, the CAR antibody moiety binds to CD19, and the ligand-binding module of the CSR binds to CD20. In some embodiments, the CAR antibody moiety binds to CD22, and the ligand-binding module of the CSR binds to CD20. In some embodiments, the CAR antibody moiety binds to CD22, and the ligand-binding module of the CSR binds to CD19. In some embodiments, the CAR antibody moiety binds to CD20, and the ligand-binding module of the CSR binds to CD19. In some embodiments, the CAR antibody moiety binds to CD20, and the ligand-binding module of the CSR binds to CD22. In some embodiments, the CAR antibody moiety and/or the ligand-binding module of the CSR binds to both CD19 and CD22. In some embodiments, the CAR antibody moiety and/or the ligand-binding module of the CSR binds to both CD19 and CD20. In some embodiments, the CAR antibody moiety and/or the ligand-binding module of the CSR binds to both CD20 and CD22. In some embodiments, the CAR antibody moiety and/or the ligand-binding module of the CSR binds to CD19, CD20, and CD22.

[0015] In some embodiments of this aspect, the CAR antibody moiety specifically binds to a complex comprising an alpha-fetoprotein (AFP) peptide and an MHC class I protein. In some embodiments, the ligand-binding module of the CSR specifically binds to glypican 3 (GPC3). In some embodiments, the CAR antibody moiety binds to a complex comprising an AFP peptide and an MHC class I protein, and the ligand-binding module of the CSR binds to GPC3.

[0016] In some embodiments, both the CAR antibody moiety and the ligand-binding module of the CSR bind to GPC3. In particular embodiments, the CAR antibody moiety and the ligand-binding module of the CSR specifically bind to different epitopes on GPC3.

[0017] In some embodiments, the CAR transmembrane domain is the transmembrane domain of CD30. In some embodiments, the CAR transmembrane domain is the transmembrane domain of CD8. In some embodiments, the CAR transmembrane domain and/or the CSR transmembrane domain is derived from the transmembrane domain of a TCR co-receptor or a T cell co-stimulatory molecule. The TCR co-receptor or T cell co-stimulatory molecule can be selected from the group consisting of CD8, 4-1BB, CD27, CD28, CD30, OX40, CD3E, CD3ζ, CD45, CD4, CD5, CD9, CD16, CD22, CD33, CD37, CD64, CD80, CD86, CD134, CD137, CD154, and Dap10. In certain embodiments, the TCR co-receptor or T cell co-stimulatory molecule is CD30 or CD8. In some embodiments, the T cell co-stimulatory molecule can be CD30. In some embodiments, the TCR co-receptor is CD8.

[0018] In some embodiments, the CAR transmembrane domain and/or the CSR transmembrane domain is the transmembrane domain of CD8, 4-1BB, CD27, CD28, CD30, OX40, CD3E, CD3ζ, CD45, CD4, CD5, CD9, CD16, CD22, CD33, CD37, CD64, CD80, CD86, CD134, CD137, CD154, or Dap10. In certain embodiments, the CAR transmembrane domain and/or the CSR transmembrane domain is the transmembrane domain of CD30 or CD8. In certain embodiments, the CAR transmembrane domain and/or the CSR transmembrane domain is the transmembrane domain of CD30. In certain embodiments, the CSR transmembrane domain is the transmembrane domain of CD30. In certain embodiments, the CAR transmembrane domain and/or the CSR transmembrane domain is the transmembrane domain of CD8. In certain embodiments, the CAR transmembrane domain and/or the CSR transmembrane domain comprises an amino acid sequence selected from the group consisting of SEQ ID NOS:66-71.

[0019] In some embodiments of this aspect, the primary signaling domain comprises a sequence derived from the intracellular signaling sequence of a molecule selected from the group consisting of CD3ζ, TCRζ, FcRγ, FcRβ, CD3γ, CD3δ, CD3ε, CD5, CD22, CD79a, CD79b, and CD66d. In some embodiments, the primary signaling domain comprises a sequence derived from the intracellular signaling sequence of CD3ζ. In some embodiments, the primary signaling domain comprises the intracellular signaling sequence of CD3ζ. In certain embodiments, the primary signaling domain comprises a sequence that is at least 80%, 85%, 90%, 95%, or 100% (e.g., 80%, 81%, 82%, 83%, 84%, 85%, 86%, 87%, 88%, 89%, 90%, 91%, 92%, 93%, 94%, 95%, 96%, 97%, 98%, 99%, or 100%) identical to the sequence of SEQ ID NO:77.

[0020] In some embodiments of this aspect, the CAR in the immune cell further comprises a peptide linker between the extracellular target-binding domain and the transmembrane domain of the CAR. In some embodiments, the CAR in the immune cell further comprises a peptide linker between the transmembrane domain and the costimulatory domain of the CAR. In some embodiments, the CAR in the immune cell further comprises a peptide linker between the costimulatory domain and the primary signaling domain of the CAR. In some embodiments, the CSR in the immune cell further comprises a peptide linker between the ligand-binding module and the transmembrane domain of the CSR. In some embodiments, the CSR in the immune cell further comprises a peptide linker between the transmembrane domain and the CD30 costimulatory domain of the CSR.

[0021] In some embodiments of this aspect, the expression of the CSR is inducible. In some embodiments, the expression of the CSR is inducible upon activation of the immune cell. In some embodiments, the immune cell is selected from the group consisting of a cytotoxic T cell, a helper T cell, a natural killer T cell, and a suppressor T cell.

[0022] In another aspect, the disclosure features one or more nucleic acids encoding the CAR and CSR comprised by the immune cell described herein, wherein the CAR and CSR each consist of one or more polypeptide chains encoded by the one or more nucleic acids.

[0023] In another aspect, the disclosure features one or more vectors comprising the one or more nucleic acids described above.

[0024] In another aspect, the disclosure features a pharmaceutical composition comprising: (a) the immune cell described herein, the nucleic acid(s) described herein, or the vector(s) described herein, and (b) a pharmaceutically acceptable carrier or diluent.

[0025] In another aspect, the disclosure features a method of killing target cells, comprising: contacting one or more target cells with the immune cell described herein under conditions and for a time sufficient so that the immune cells mediate killing of the target cells, wherein the target cells express an antigen specific to the immune cell, and wherein the immune cell expresses a low cell exhaustion level upon contacting the target cells. In some embodiments, the immune cell expresses a low cell exhaustion level of an exhaustion marker selected from the group consisting of PD-1, TIM-3, TIGIT, and LAG-3. In certain embodiments, the immune cell is a T cell. In certain embodiments, the immune cell expresses a low cell exhaustion level of PD-1. In some embodiments, the ratio of PD-1 from immune cells (e.g., CD8⁺ T cells, CD4⁺ T cells) expressing a 1^{st} generation CAR (e.g., αAFP-CD8T-z-CAR) and CD30-CSR to PD-1 from immune cells expressing the 1^{st} generation CAR alone is between 0.05 and 0.5 (e.g., between 0.05 and 0.45, between 0.05 and 0.4, between 0.05 and 0.35, between 0.05 and 0.3, between 0.05 and 0.25, between 0.05 and 0.2, between 0.05 and 0.15, between 0.05 and 0.1, between 0.1 and 0.45, between 0.15 and 0.45, between 0.2 and 0.45, between 0.25 and 0.45, between 0.3 and 0.45, between 0.35 and 0.45, or between 0.4 and 0.45). In some embodiments, the ratio of PD-1 from immune cells (e.g., CD8⁺ T cells, CD4⁺ T cells) expressing a 2nd generation CAR (e.g., aAFP-CD28z-CAR) and CD30-CSR to PD-1 from immune cells expressing the 2nd generation CAR alone is between 0.05 and 0.5 (e.g., between 0.05 and 0.45, between 0.05 and 0.4, between 0.05 and 0.35, between 0.05 and 0.3, between 0.05 and 0.25, between 0.05 and 0.2, between 0.05 and 0.15, between 0.05 and 0.1, between 0.1 and 0.45, between 0.15 and 0.45, between 0.2 and 0.45, between 0.25 and 0.45, between 0.3 and 0.45, between 0.35 and 0.45, or between 0.4 and 0.45). In certain embodiments, the immune cell expresses a low cell exhaustion level of TIM-3. In certain embodiments, the immune cell expresses a low cell exhaustion level of TIGIT. In certain embodiments, the immune cell expresses a low cell exhaustion level of LAG-3. In some embodiments, the ratio of LAG-3 from immune cells (e.g., CD8⁺ T cells, CD4⁺ T cells) expressing a 2nd generation CAR (e.g., αAFP-CD28z-CAR) and CD30-CSR to LAG-3 from immune cells expressing the 2nd generation CAR alone is between 0.1 and 0.9 (e.g., between 0.1 and 0.8, between 0.1 and 0.7, between 0.1 and 0.6, between 0.1 and 0.5, between 0.1 and 0.4, between 0.1 and 0.3, between 0.1 and 0.2, between 0.2 and 0.9, between 0.3 and 0.9, between 0.4 and 0.9, between 0.5 and 0.9, between 0.6 and 0.9, between 0.7 and 0.9, or between 0.8 and 0.9).

[0026] In some embodiments, the immune cell expresses a lower level of PD-1, TIM-3, TIGIT, or LAG-3 than corresponding immune cell expressing a CSR comprising a CD28 costimulatory domain. In some embodiments, the immune cell expresses a lower level of PD-1 than the corresponding CD28 CSR immune cell, and wherein the ratio of PD-1 expression level of the immune cell to the corresponding CD28 CSR immune cell is 0.9, 0.8, 0.7, 0.6, 0.5, 0.4, 0.3, 0.2, 0.1 or lower. In some embodiments, the immune cell expresses a lower level of TIM-3 than the corresponding CD28 CSR immune cell, and wherein the ratio of TIM-3 expression level of the immune cell to the corresponding CD28 CSR immune cell is 0.9, 0.8, 0.7, 0.6, 0.5, 0.4, 0.3, 0.2, 0.1 or lower. In some embodiments, the immune cell expresses a lower level of LAG-3 than the corresponding CD28 CSR immune cell, and wherein the ratio of LAG-3 expression level of the immune cell to the corresponding CD28 CSR immune cell is 0.9, 0.8, 0.7, 0.6, 0.5, 0.4, 0.3, 0.2, 0.1 or lower. In some embodiments, the immune cell expresses a lower level of TIGIT than the corresponding CD28 CSR immune cell, and wherein the ratio of TIGIT expression level of the immune cell to the corresponding CD28 CSR immune cell is 0.9, 0.8, 0.7, 0.6, 0.5, 0.4, 0.3, 0.2, 0.1 or lower.

[0027] In some embodiments, the immune cell expresses a lower level of PD-1, TIM-3, TIGIT, or LAG-3 than corresponding immune cell expressing a CSR comprising a 4-1BB costimulatory domain. In some embodiments, the immune cell expresses a lower level of PD-1 than the corresponding 4-1BB CSR immune cell, and wherein the ratio of PD-1 expression level of the immune cell to the corresponding 4-1BB CSR immune cell is 0.9, 0.8, 0.7, 0.6, 0.5, 0.4, 0.3, 0.2, 0.1 or lower. In some embodiments, the immune cell expresses a lower level of TIM-3 than the corresponding 4-1BB CSR immune cell, and wherein the ratio of TIM-3 expression level of the immune cell to the corresponding 4-1BB CSR immune cell is 0.9, 0.8, 0.7, 0.6, 0.5, 0.4, 0.3, 0.2, 0.1 or lower. In some embodiments, the immune cell expresses a lower level of LAG-3 than the corresponding 4-1BB CSR immune cell, and wherein the ratio of LAG-3 expression level of the immune cell to the corresponding 4-1BB CSR immune cell is 0.9, 0.8, 0.7, 0.6, 0.5, 0.4, 0.3, 0.2, 0.1 or lower. In some embodiments, the immune cell expresses a lower level of TIGIT than the corresponding 4-1BB CSR immune cell, and wherein the ratio of TIGIT expression level of the immune cell to the corresponding 4-1BB CSR immune cell is 0.9, 0.8, 0.7, 0.6, 0.5, 0.4, 0.3, 0.2, 0.1 or lower.

[0028] In some embodiments, the immune cell expresses a lower level of PD-1, TIM-3, TIGIT, or LAG-3 than corresponding immune cell expressing a CSR comprising a Dap10 costimulatory domain. In some embodiments, the immune cell expresses a lower level of PD-1 than the corresponding Dap10 CSR immune cell, and wherein the ratio of PD-1 expression level of the immune cell to the corresponding Dap10 CSR immune cell is 0.9, 0.8, 0.7, 0.6, 0.5, 0.4, 0.3, 0.2, 0.1 or lower. In some embodiments, the immune cell expresses a lower level of TIM-3 than the corresponding Dap10 CSR immune cell, and wherein the ratio of TIM-3 expression level of the immune cell to the corresponding Dap10 CSR immune cell is 0.9, 0.8, 0.7, 0.6, 0.5, 0.4, 0.3, 0.2, 0.1 or lower. In some embodiments, the immune cell expresses a lower level of LAG-3 than the corresponding Dap10 CSR immune cell, and wherein the ratio of LAG-3 expression level of the immune cell to the corresponding Dap10 CSR immune cell is 0.9, 0.8, 0.7, 0.6, 0.5, 0.4, 0.3, 0.2, 0.1 or lower. In some embodiments, the immune cell expresses a lower level of TIGIT than the corresponding Dap10 CSR immune cell, and wherein the ratio of TIGIT expression level of the immune cell to the corresponding Dap10 CSR immune cell is 0.9, 0.8, 0.7, 0.6, 0.5, 0.4, 0.3, 0.2, 0.1 or lower.

[0029] In some embodiments of this aspect, the target cells are cancer cells. The cancer cells can be from a cancer selected from the group consisting of adrenocortical carcinoma, bladder cancer, breast cancer, cervical cancer, cholangiocarcinoma, colorectal cancers, esophageal cancer, glioblastoma, glioma, hepatocellular carcinoma, head and neck cancer, kidney cancer, leukemia, lymphoma, lung cancer, melanoma, mesothelioma, multiple myeloma, pancreatic cancer, pheochromocytoma, plasmacytoma, neuroblastoma, ovarian cancer, prostate cancer, sarcoma, stomach cancer, uterine cancer, and thyroid cancer. The cancer cells can be hematological cancer cells. The cancer cells can be solid tumor cells.

[0030] In some embodiments, the target cells are virus-infected cells. The virus-infected cells can be from a viral infection caused by a virus selected from the group consisting of Cytomegalovirus (CMV), Epstein-Barr Virus (EBV), Hepatitis B Virus (HBV), Kaposi's Sarcoma associated herpesvirus (KSHV), Human papillomavirus (HPV), Molluscum contagiosum virus (MCV), Human T cell leukemia virus 1 (HTLV-1), HIV (Human immunodeficiency virus), and Hepatitis C Virus (HCV).

[0031] In another aspect, the disclosure features a method of treating a disease, the method comprising a step of administering to a subject the immune cell described herein, the nucleic acid(s) described herein, or the vector(s) described herein, or the pharmaceutical composition described herein to the subject. In some embodiments, the disease is a viral infection. In some embodiments, the disease is cancer. The cancer can be a hematological cancer. The cancer can be a solid tumor cancer.

[0032] In some embodiments, the subject has a higher density of the immune cell described herein in the solid tumor cancer than in the rest of the subject's body.

[0033] In some embodiments, the cancer is selected from the group consisting of adrenocortical carcinoma, bladder cancer, breast cancer, cervical cancer, cholangiocarcinoma, colorectal cancers, esophageal cancer, glioblastoma, glioma, hepatocellular carcinoma, head and neck cancer, kidney cancer, leukemia, lymphoma, lung cancer, melanoma, mesothelioma, multiple myeloma, pancreatic cancer, pheochromocytoma, plasmacytoma, neuroblastoma, ovarian cancer, prostate cancer, sarcoma, stomach cancer, uterine cancer, and thyroid cancer.

[0034] In another aspect, the disclosure features a method for preventing and/or reversing T cell exhaustion in a subject, comprising administering to the subject the nucleic acid(s) described herein, the vector(s) described herein, or the pharmaceutical composition described herein comprising the nucleic acid(s) or the vector(s) to the subject. In some embodiments, the method decreases the expression of an exhaustion marker in a T cell. The exhaustion marker can be selected from the group consisting of PD-1, TIM-3, TIGIT, and LAG-3.

[0035] In another aspect, the disclosure features a method of treating a solid tumor cancer in a subject with increased tumor infiltration or immune cell expansion as compared to treating the same type of solid tumor cancer with immune cells expressing a CAR and a CSR comprising a CD28 or 4-1BB costimulatory domain, wherein the method comprises administering to the subject corresponding immune cells expressing the same CAR and a corresponding CSR comprising a CD30 costimulatory domain, and wherein the corresponding immune cells comprise the immune cell described herein. In another aspect, the disclosure features a method of treating a solid tumor cancer in a subject with increased tumor infiltration or immune cell expansion as compared to treating the same type of solid tumor cancer with immune cells expressing a CAR and a CSR comprising a Dap10 costimulatory domain, wherein the method comprises administering to the subject corresponding immune cells expressing the same CAR and a corresponding CSR comprising a CD30 costimulatory domain, and wherein the corresponding immune cells comprise the immune cell described herein. In some embodiments, experiments can be conducted in animals, e.g., mice, to compare the effects of the immune cells in treating a solid tumor cancer by using one group of immune cells comprising a CAR and a CSR with a CD30 costimulatory domain and another group of immune cells comprising the same CAR and a corresponding CSR with a non-CD30 costimulatory domain, e.g., a 4-1BB costimulatory domain, a CD28 costimulatory domain, or a Dap10 costimulatory domain.

[0036] In some embodiments of the methods described herein, the ratio of the number of tumor cells infiltrated by immune cells expressing a 2nd generation CAR (e.g., αAFP-CD28z-CAR, αGPC3-CD28z-CAR) and CD30-CSR to the number of tumor cells infiltrated by immune cells expressing the 2nd generation CAR alone is between 1 and 20 (e.g., between 1 and 18, between 1 and 16, between 1 and 14, between 1 and 12, between 1 and 10, between 1 and 8, between 1 and 6, between 1 and 4, between 1 and 2, between 2 and 20, between 4 and 20, between 6 and 20, between 8 and 20, between 10 and 20, between 12 and 20, between 14 and 20, between 16 and 20, or between 18 and 20).

[0037] In some embodiments of the methods described herein, the ratio of the blood concentration of immune cells expressing a 2nd generation CAR (e.g., αAFP-CD28z-CAR, αGPC3-CD28z-CAR) and CD30-CSR to the blood concentration of immune cells expressing the 2nd generation CAR alone is between 1 and 5 (e.g., between 1 and 4, between 1 and 3, between 1 and 2, between 2 and 5, between 3 and 5, or between 4 and 5).

[0038] In another aspect, the disclosure features a method of treating a solid tumor cancer in a subject with increased tumor regression as compared to treating the same type of solid tumor cancer with immune cells expressing a CAR and a CSR comprising a CD28 or 4-1BB costimulatory domain, wherein the method comprises administering to the subject corresponding immune cells expressing the same CAR and a corresponding CSR comprising a CD30 costimulatory domain, and wherein the corresponding immune cells comprise the immune cell described herein. In another aspect, the disclosure features a method of treating a solid tumor cancer in a subject with increased tumor regression as compared to treating the same type of solid tumor cancer with immune cells expressing a CAR and a CSR comprising a Dap10 costimulatory domain, wherein the method comprises administering to the subject corresponding immune cells expressing the same CAR and a corresponding CSR comprising a CD30 costimulatory domain, and wherein the corresponding immune cells comprise the immune cell described herein. In some embodiments, experiments can be conducted in animals, e.g., mice, to compare the effects of the immune cells on tumor regression by using one group of immune cells comprising a CAR and a CSR with a CD30 costimulatory domain and another group of immune cells comprising the same CAR and a corresponding CSR with a non-CD30 costimulatory domain, e.g., a 4-1BB costimulatory domain, a CD28 costimulatory domain, or a Dap10 costimulatory domain.

[0039] In another aspect, the disclosure features a method for generating central memory T cells in a subject, comprising administering to the subject the nucleic acid(s) described herein, the vector(s) described herein, or the pharmaceutical composition described herein comprising the nucleic acid(s) or the vector(s) to the subject.

[0040] In some embodiments, the method increases the number of central memory T cells and/or the percentage of central memory T cells among all T cells in the subject.

[0041] In another aspect, the disclosure provides a method for generating central memory T cells in vitro comprising: contacting one or more target cells with the immune cell described herein under conditions and for a time sufficient so that the immune cell develops into central memory T cells, wherein the target cells express an antigen specific to the immune cell.

[0042] In some embodiments, the method increases the number of central memory T cells and/or the percentage of central memory T cells among all T cells descended from the immune cell.

[0043] In some embodiments, the method generates higher number of central memory T cells and/or higher percentage of central memory T cells than corresponding immune cell expressing a CSR comprising a CD28 costimulatory domain.

[0044] In some embodiments, the method generates at least 10%, 20%, 30%, 40%, 50%, 60%, 70%, 80%, 90%, 100%, 200%, 300%, 400%, or 500% higher number of central memory T cells and/or percentage of central memory T cells than corresponding immune cell expressing a CSR comprising a CD28 costimulatory domain.

[0045] In some embodiments of the methods described herein, immune cells (e.g., CD8⁺ T cells) expressing a 1st generation CAR (e.g., αAFP-CD8T-z-CAR) and CD30-CSR generates more central memory T cells than immune cells (e.g., CD8⁺ T cells) expressing the 1^{st} generation CAR alone. For example, in some embodiments, the ratio of the number of central memory T cells generated by immune cells (e.g., CD8⁺ T cells) expressing a 1^{st} generation CAR (e.g., αAFP-CD8T-z-CAR) and CD30-CSR to the number of central memory T cells generated by immune cells (e.g., CD8⁺ T cells) expressing the 1^{st} generation CAR alone is between 5 and 1000 (e.g., between 5 and 900, between 5 and 800, between 5 and 700, between 5 and 600, between 5 and 500, between 5 and 400, between 5 and 300, between 5 and 200, between 5 and 100, between 5 and 50, between 5 and 10, between 10 and 1000, between 50 and 1000, between 100 and 1000, between 200 and 1000, between 300 and 1000, between 400 and 1000, between 500 and 1000, between 600 and 1000, between 700 and 1000, between 800 and 1000, or between 900 and 1000). For example, in some embodiments, the ratio of the number of central memory T cells generated by immune cells (e.g., CD8⁺ T cells) expressing a 1st generation CAR (e.g., αAFP-CD8T-z-CAR) and CD30-CSR to the number of central memory T cells generated by immune cells (e.g., CD8⁺ T cells) expressing the 1^{st} generation CAR alone is between 1.5 and 8000 (e.g., between 1.5 and 7000, between 1.5 and 6000, between 1.5 and 5000, between 1.5 and 4000, between 1.5 and 3000, between 1.5 and 2000, between 1.5 and 1000, between 1.5 and 500, between 1.5 and 100, between 10 and 8000, between 500 and 8000, between 1000 and 8000, between 2000 and 8000, between 3000 and 8000, between 4000 and 8000, between 5000 and 8000, between 6000 and 8000, or between 7000 and 8000).

[0046] In some embodiments of the methods described herein, immune cells (e.g., CD8⁺ T cells) expressing a 2nd generation CAR (e.g., αAFP-CD28z-CAR) and CD30-CSR generates more central memory T cells than immune cells (e.g., CD8⁺ T cells) expressing the 2nd generation CAR alone. For example, in some embodiments, the ratio of the number of central memory T cells generated by immune cells (e.g., CD8⁺ T cells) expressing a 2nd generation CAR (e.g., αAFP-CD28z-CAR) and CD30-CSR to the number of central memory T cells generated by immune cells (e.g., CD8⁺ T cells) expressing the 2nd generation CAR alone is between 0.5 and 3500 (e.g., between 0.5 and 3000, between 0.5 and 2500, between 0.5 and 2000, between 0.5 and 1500, between 0.5 and 1000, between 0.5 and 500, between 0.5 and 100, between 0.5 and 50, between 50 and 3500, between 100 and 3500, between 500 and 3500, between 1000 and 3500, between 1500 and 3500, between 2000 and 3500, between 2500 and 3500, or between 3000 and 3500). For example, in some embodiments, the ratio of the number of central memory T cells generated by immune cells (e.g., CD8⁺ T cells) expressing a 2nd generation CAR (e.g., αAFP-CD28z-CAR) and CD30-CSR to the number of central memory T cells generated by immune cells (e.g., CD8⁺ T cells) expressing the 2nd generation CAR alone is between 1.5 and 20,000 (e.g., between 1.5 and 18,000, between 1.5 and 16,000, between 1.5 and 14,000, between 1.5 and 12,000, between 1.5 and 10,000, between 1.5 and 8,000, between 1.5 and 6,000, between 1.5 and 4,000, between 1.5 and 2,000, between 1.5 and 1,800, between 1.5 and 1,600, between 1.5 and 1,400, between 1.5 and 1,200, between 1.5 and 1,000, between 1.5 and 800, between 1.5 and 600, between 1.5 and 400, between 1.5 and 200, between 1.5 and 100, between 100 and 20,000, between 200 and 20,000, between 400 and 20,000, between 600 and 20,000, between 800 and 20,000, between 1000 and 20,000, between 1,200 and 20,000, between 1,400 and 20,000, between 1,600 and 20,000, between 1,800 and 20,000, between 2,000 and 20,000, between 4,000 and 20,000, between 6,000 and 20,000, between 8,000 and 20,000, between 10,000 and 20,000, between 12,000 and 20,000, between 14,000 and 20,000, between 16,000 and 20,000, or between 18,000 and 20,000).

[0047] In some embodiments, the central memory T cells express high levels of CCR7 and low levels of CD45RA.

[0048] In some embodiments, the central memory T cells are CD8⁺ T cells.

### Definitions

[0049] The scope of present invention is defined by the claims appended hereto and is not limited by particular embodiments described herein; those skilled in the art, reading the present disclosure, will be aware of various modifications that may be equivalent to such described embodiments, or otherwise within the scope of the claims.

[0050] In general, terminology used herein is in accordance with its understood meaning in the art, unless clearly indicated otherwise. Explicit definitions of certain terms are provided below; meanings of these and other terms in particular instances throughout this specification will be clear to those skilled in the art from context.

[0051] In order that the present invention may be more readily understood, certain terms are first defined below. Additional definitions for the following terms and other terms are set forth throughout the specification.

[0052] Administration: As used herein, the term “administration” refers to the administration of a composition to a subject or system (e.g., to a cell, organ, tissue, organism, or relevant component or set of components thereof). Those of ordinary skill will appreciate that route of administration may vary depending, for example, on the subject or system to which the composition is being administered, the nature of the composition, the purpose of the administration, etc. For example, in certain embodiments, administration to an animal subject (e.g., to a human) may be bronchial (including by bronchial instillation), buccal, enteral, interdermal, intra-arterial, intradermal, intragastric, intrahepatic, intramedullary, intramuscular, intranasal, intraperitoneal, intrathecal, intratumoral, intravenous, intraventricular, mucosal, nasal, oral, rectal, subcutaneous, sublingual, topical, tracheal (including by intratracheal instillation), transdermal, vaginal and/or vitreal. In some embodiments, administration may involve intermittent dosing. In some embodiments, administration may involve continuous dosing (e.g., perfusion) for at least a selected period of time.

[0053] Affinity: As is known in the art, “affinity” is a measure of the tightness with a particular ligand binds to its partner. Affinities can be measured in different ways. In some embodiments, affinity is measured by a quantitative assay. In some such embodiments, binding partner concentration may be fixed to be in excess of ligand concentration so as to mimic physiological conditions. Alternatively or additionally, in some embodiments, binding partner concentration and/or ligand concentration may be varied. In some such embodiments, affinity may be compared to a reference under comparable conditions (e.g., concentrations).

[0054] Affinity matured (or affinity matured antibody): As used herein, refers to an antibody with one or more alterations in one or more CDRs (or, in some embodiments, framework regions) thereof which result an improvement in the affinity of the antibody for antigen, compared to a parent antibody which does not possess those alteration(s). In some embodiments, affinity matured antibodies will have nanomolar or even picomolar affinities for a target antigen. Affinity matured antibodies may be produced by any of a variety of procedures known in the art. Marks et al., 1992, BioTechnology 10:779-783 describes affinity maturation by V_{H} and V_{L} domain shuffling. Random mutagenesis of CDR and/or framework residues is described by: Barbas et al., 1994, Proc. Nat. Acad. Sci., U.S.A. 91:3809-3813; Schier et al., 1995, Gene 169: 147-155; Yelton et al., 1995. J. Immunol. 155:1994-2004; Jackson et al., 1995, J. Immunol. 154(7):3310-9; and Hawkins et al., 1992, J. Mol. Biol. 226:889-896. Selection of binders with improved binding properties is described by Thie et al., 2009, Methods Mol. Bio. 525:309-22.

[0055] Agent: As used herein may refer to a compound or entity of any chemical class including, for example, polypeptides, nucleic acids, saccharides, lipids, small molecules, metals, or combinations thereof. In some embodiments, an agent is or comprises a natural product in that it is found in and/or is obtained from nature. In some embodiments, an agent is or comprises one or more entities that is man-made in that it is designed, engineered, and/or produced through action of the hand of man and/or is not found in nature. In some embodiments, an agent may be utilized in isolated or pure form; in some embodiments, an agent may be utilized in crude form. In some embodiments, potential agents are provided as collections or libraries, for example that may be screened to identify or characterize active agents within them. Some particular embodiments of agents that may be utilized in accordance with the present invention include small molecules, antibodies, aptamers, nucleic acids (e.g., siRNAs, shRNAs, DNA/RNA hybrids, antisense oligonucleotides, ribozymes), peptides, peptide mimetics, etc. In some embodiments, an agent is or comprises a polymer. In some embodiments, an agent is not a polymer and/or is substantially free of any polymer. In some embodiments, an agent contains at least one polymeric moiety. In some embodiments, an agent lacks or is substantially free of any polymeric moiety.

[0056] Amino acid: As used herein, term “amino acid,” in its broadest sense, refers to any compound and/or substance that can be incorporated into a polypeptide chain. In some embodiments, an amino acid has the general structure H₂N—C(H)(R)—COOH. In some embodiments, an amino acid is a naturally occurring amino acid. In some embodiments, an amino acid is a synthetic amino acid; in some embodiments, an amino acid is a D-amino acid; in some embodiments, an amino acid is an L-amino acid. “Standard amino acid” refers to any of the twenty standard L-amino acids commonly found in naturally occurring peptides. “Nonstandard amino acid” refers to any amino acid, other than the standard amino acids, regardless of whether it is prepared synthetically or obtained from a natural source. As used herein, “synthetic amino acid” encompasses chemically modified amino acids, including but not limited to salts, amino acid derivatives (such as amides), and/or substitutions. Amino acids, including carboxy- and/or amino-terminal amino acids in peptides, can be modified by methylation, amidation, acetylation, protecting groups, and/or substitution with other chemical groups that can change the peptide's circulating half-life without adversely affecting their activity. Amino acids may participate in a disulfide bond. Amino acids may comprise one or post-translational modifications, such as association with one or more chemical entities (e.g., methyl groups, acetate groups, acetyl groups, phosphate groups, formyl moieties, isoprenoid groups, sulfate groups, polyethylene glycol moieties, lipid moieties, carbohydrate moieties, biotin moieties, etc.). The term “amino acid” is used interchangeably with “amino acid residue,” and may refer to a free amino acid and/or to an amino acid residue of a peptide. It will be apparent from the context in which the term is used whether it refers to a free amino acid or a residue of a peptide.

[0057] Animal: As used herein refers to any member of the animal kingdom. In some embodiments, “animal” refers to humans, of either sex and at any stage of development. In some embodiments, “animal” refers to non-human animals, at any stage of development. In certain embodiments, the non-human animal is a mammal (e.g., a mouse, a rat, a rabbit, a pig, a cow, a deer, a sheep, a goat, a cat, a dog, or a monkey). In some embodiments, animals include, but are not limited to, mammals, birds, reptiles, amphibians, fish, insects, and/or worms. In some embodiments, an animal may be a transgenic animal, genetically engineered animal, and/or a clone.

[0058] Antibody moiety: As used herein, this term encompasses full-length antibodies and antigen-binding fragments thereof. A full-length antibody comprises two heavy chains and two light chains. The variable regions of the light and heavy chains are responsible for antigen binding. The variable regions in both chains generally contain three highly variable loops called the complementarity determining regions (CDRs) (light chain (LC) CDRs including LC-CDR1, LC-CDR2, and LC-CDR3, heavy chain (HC) CDRs including HC-CDR1, HC-CDR2, and HC-CDR3). CDR boundaries for the antibodies and antigen-binding fragments disclosed herein may be defined or identified by the conventions of Kabat, Chothia, or Al-Lazikani (Al-Lazikani 1997; Chothia 1985; Chothia 1987; Chothia 1989; Kabat 1987; Kabat 1991). The three CDRs of the heavy or light chains are interposed between flanking stretches known as framework regions (FRs), which are more highly conserved than the CDRs and form a scaffold to support the hypervariable loops. The constant regions of the heavy and light chains are not involved in antigen binding, but exhibit various effector functions. Antibodies are assigned to classes based on the amino acid sequence of the constant region of their heavy chain. The five major classes or isotypes of antibodies are IgA, IgD, IgE, IgG, and IgM, which are characterized by the presence of α, δ, ε, γ, and μ heavy chains, respectively. Several of the major antibody classes are divided into subclasses such as IgG1 (γ1 heavy chain), IgG2 (γ2 heavy chain), IgG3 (γ3 heavy chain), IgG4 (γ4 heavy chain), IgA1 (α1 heavy chain), or IgA2 (α2 heavy chain).

[0059] Antigen-binding fragment or Antigen-binding portion: The term “antigen-binding fragment” or “antigen-binding portion,” as used herein, refers to an antibody fragment including, for example, a diabody, a Fab, a Fab′, a F(ab′)2, an Fv fragment, a disulfide stabilized Fv fragment (dsFv), a (dsFv)2, a bispecific dsFv (dsFv-dsFv′), a disulfide stabilized diabody (ds diabody), a single-chain Fv (scFv), an scFv dimer (bivalent diabody), a multispecific antibody formed from a portion of an antibody comprising one or more CDRs, a camelized single domain antibody, a nanobody, a domain antibody, a bivalent domain antibody, or any other antibody fragment that binds to an antigen but does not comprise a complete antibody structure. An antigen-binding fragment is capable of binding to the same antigen to which the parent antibody or a parent antibody fragment (e.g., a parent scFv) binds. In some embodiments, an antigen-binding fragment may comprise one or more CDRs from a particular human antibody grafted to a framework region from one or more different human antibodies.

[0060] Biological activity: As used herein, refers to an observable biological effect or result achieved by an agent or entity of interest. For example, in some embodiments, a specific binding interaction is a biological activity. In some embodiments, modulation (e.g., induction, enhancement, or inhibition) of a biological pathway or event is a biological activity. In some embodiments, presence or extent of a biological activity is assessed through detection of a direct or indirect product produced by a biological pathway or event of interest.

[0061] Bispecific antibody: As used herein, refers to a bispecific binding agent in which at least one, and typically both, of the binding moieties is or comprises an antibody moiety. A variety of different bispecific antibody structures are known in the art. In some embodiments, each binding moiety in a bispecific antibody that is or comprises an antibody moiety includes V_{H} and/or V_{L} regions; in some such embodiments, the V_{H} and/or V_{L} regions are those found in a particular monoclonal antibody. In some embodiments, where the bispecific antibody contains two antibody moieties, each includes V_{H} and/or V_{L} regions from different monoclonal antibodies.

[0062] The term “bispecific antibody” as used herein also refers to a polypeptide with two discrete binding moieties, each of which binds a distinct target. In some embodiments, a bispecific binding antibody is a single polypeptide; in some embodiments, a bispecific binding antibody is or comprises a plurality of peptides which, in some such embodiments may be covalently associated with one another, for example by cross-linking. In some embodiments, the two binding moieties of a bispecific binding antibody recognize different sites (e.g., epitopes) of the same target (e.g., antigen); in some embodiments, they recognize different targets. In some embodiments, a bispecific binding antibody is capable of binding simultaneously to two targets, which are of different structure.

[0063] Carrier: As used herein, refers to a diluent, adjuvant, excipient, or vehicle with which a composition is administered. In some exemplary embodiments, carriers can include sterile liquids, such as, for example, water and oils, including oils of petroleum, animal, vegetable or synthetic origin, such as, for example, peanut oil, soybean oil, mineral oil, sesame oil and the like. In some embodiments, carriers are or include one or more solid components.

[0064] CDR: As used herein, the term “CDR” or “complementarity determining region” is intended to mean the non-contiguous antigen combining sites found within the variable region of both heavy and light chain polypeptides. There are three CDRs in each of the variable regions of the heavy chain and the light chain, which are designated CDR1, CDR2 and CDR3, for each of the variable regions. A “set of CDRs” or “CDR set” refers to a group of three or six CDRs that occur in either a single variable region capable of binding the antigen or the CDRs of cognate heavy and light chain variable regions capable of binding the antigen. These particular regions have been described by Kabat et al., J. Biol. Chem. 252:6609-6616 (1977); Kabat et al., U.S. Dept. of Health and Human Services, “Sequences of proteins of immunological interest” (1991); Chothia et al., J. Mol. Biol. 196:901-917 (1987); A1-Lazikani B. et al., J. Mol. Biol., 273: 927-948 (1997); MacCallum et al., J. Mol. Biol. 262:732-745 (1996); Abhinandan and Martin, Mol. Immunol., 45: 3832-3839 (2008); Lefranc M. P. et al., Dev. Comp. Immunol., 27: 55-77 (2003); and Honegger and Plackthun, J. Mol. Biol., 309:657-670 (2001), where the definitions include overlapping or subsets of amino acid residues when compared against each other. Nevertheless, application of either definition to refer to a CDR of an antibody or grafted antibodies or variants thereof is intended to be within the scope of the term as defined and used herein. The amino acid residues which encompass the CDRs as defined by each of the above cited references are set forth below in Table 1 as a comparison. CDR prediction algorithms and interfaces are known in the art, including, for example, Abhinandan and Martin, Mol. Immunol., 45: 3832-3839 (2008); Ehrenmann F. et al., Nucleic AcidsRes., 38: D301-D307 (2010); and Adolf-Bryfogle J. et al., Nucleic Acids Res., 43: D432-D438 (2015). The contents of the references cited in this paragraph are incorporated herein by reference in their entireties for use in the present invention and for possible inclusion in one or more claims herein.

TABLE 1

| | Kabat¹ | Chothia² | MacCallum³ | IMGT⁴ | AHo⁵ |
|---|---|---|---|---|---|
| V_{H} CDR1 | 31-35 | 26-32 | 30-35 | 27-38 | 25-40 |
| V_{H} CDR2 | 50-65 | 53-55 | 47-58 | 56-65 | 58-77 |
| V_{H} CDR3 | 95-102 | 96-101 | 93-101 | 105-117 | 109-137 |
| V_{L} CDR1 | 24-34 | 26-32 | 30-36 | 27-38 | 25-40 |
| V_{L} CDR2 | 50-56 | 50-52 | 46-55 | 56-65 | 58-77 |
| V_{L} CDR3 | 89-97 | 91-96 | 89-96 | 105-117 | 109-137 |

¹Residue numbering follows the nomenclature of Kabat et al., supra
²Residue numbering follows the nomenclature of Chothia et al., supra
‘Residue numbering follows the nomenclature of MacCallum et al., supra
⁴Residue numbering follows the nomenclature of Lefranc et al., supra
⁵Residue numbering follows the nomenclature of Honegger and Plückthun, supra

[0065] Chimeric antigen receptors (CARs): As used herein, refers to an artificially constructed hybrid single-chain protein or single-chain polypeptide containing an extracellular target-binding (e.g., antigen-binding) domain, linked directly or indirectly to a transmembrane domain (“TM domain”, e.g., the transmembrane domain of a costimulatory molecule), which is in turn linked directly or indirectly to an intracellular signaling domain (ISD) comprising a primary immune cell signaling domain (e.g., one involved in T cell or NK cell activation). The extracellular target-binding domain can be a single-chain variable fragment derived from an antibody (scFv). In addition to scFvs, other single chain antigen binding domains can be used in CAR, e.g., tandem scFvs, single-domain antibody fragments (VHHs or sdAbs), single domain bispecific antibodies (BsAbs), intrabodies, nanobodies, immunokines in a single chain format, and Fab, Fab′, or (Fab′)2 in single chain formats. The extracellular target-binding domain can be joined to the TM domain via a flexible hinge/spacer region. The intracellular signaling domain (ISD) comprises a primary signaling sequence, or primary immune cell signaling sequence, which can be from an antigen-dependent, TCR-associated T cell activation molecule, e.g., a portion of the intracellular domain of TCRζ, FcRγ, FcRβ, CD3γ, CD3δ, CD3ε, CD3ζ, CD5, CD22, CD79a, CD79b, or CD66d. The ISD can further comprise a costimulatory signaling sequence; e.g., a portion of the intracellular domain of an antigen-independent, costimulatory molecule such as CD27, CD28, 4-1BB (CD137), OX40, CD30, CD40, PD-1, ICOS, lymphocyte function-associated antigen-1 (LFA-1), CD2, CD7, LIGHT, NKG2C, B7-H3, a ligand that specifically binds CD83, Dap10, or the like. Characteristics of CARs include their ability to redirect immune cell (e.g., T cell or NK cell) specificity and reactivity toward a selected target in either MHC-restricted (in cases of TCR-mimic antibodies) or non-MHC-restricted (in cases of antibodies against cell surface proteins) manners, exploiting the antigen-binding properties of monoclonal antibodies. The non-MHC-restricted antigen recognition gives immune cells (e.g., T cells or NK cells) expressing CARs the ability to recognize antigen independent of antigen processing, thus bypassing a major mechanism of tumor escape.

[0066] There are currently three generations of CARs. The “first generation” CARs are typically single-chain polypeptides composed of a scFv as the antigen-binding domain fused to a transmembrane domain fused to the cytoplasmic/intracellular domain, which comprises a primary immune cell signaling sequence such as the intracellular domain from the CD3ζ chain, which is the primary transmitter of signals from endogenous TCRs. The “first generation” CARs can provide de novo antigen recognition and cause activation of both CD4⁺ and CD8⁺ T cells through their CD3ζ chain signaling domain in a single fusion molecule, independent of HLA-mediated antigen presentation. The “second generation” CARs add intracellular domains from various costimulatory molecules (e.g., CD28, 4-1BB, ICOS, OX40) to the primary immune cell signaling sequence of the CAR to provide additional signals to the T cell. Thus, the “second generation” CARs comprise fragments that provide costimulation (e.g., CD28 or 4-IBB) and activation (e.g., CD3ζ). Preclinical studies have indicated that the “second generation” CARs can improve the antitumor activity of T cells. For example, robust efficacy of the “second generation” CAR modified T cells was demonstrated in clinical trials targeting the CD19 molecule in patients with chronic lymphoblastic leukemia (CLL) and acute lymphoblastic leukemia (ALL). The “third generation” CARs comprise those that provide multiple costimulation (e.g., CD28 and 4-1BB) and activation (e.g., CD3ζ). Examples of CAR T therapies are described, see, e.g., U.S. Pat. No. 10,221,245 describing CAR CTL019 which has an anti-CD19 extracellular target-binding domain, a transmembrane domain from CD8, a costimulatory domain from 4-1BB, and a primary signaling domain from CD3ζ, as well as U.S. Pat. No. 9,855,298 which describes a CAR having an anti-CD19 extracellular target-binding domain, a costimulatory domain from CD28, and a primary signaling domain from CD3ζ.

[0067] Adoptive cell therapy: Adoptive cell therapy is a therapeutic approach that typically includes isolation and ex vivo expansion and/or manipulation of immune cells (e.g., NK cells or T cells) and subsequent administration of these cells to a patient, for example for the treatment of cancer. Administered cells may be autologous or allogeneic. Cells may be manipulated to express engineered receptors (including CAR and CSR) in any one of the known ways, including, for example, by using RNA and DNA transfection, viral transduction, electroporation, all of which are technologies known in the art.

[0068] The term “adoptive cell therapeutic composition” refers to any composition comprising cells suitable for adoptive cell transfer. In exemplary embodiments, the adoptive cell therapeutic composition comprises a cell type selected from a group consisting of a tumor infiltrating lymphocyte (TIL) and CAR and/or CSR modified lymphocytes. In another embodiment, the adoptive cell therapeutic composition comprises a cell type selected from a group consisting of T cells, CD8⁺ cells, CD4⁺ cells, NK-cells, delta-gamma T cells, regulatory T cells, and peripheral blood mononuclear cells. In another embodiment, TILs, T cells, CD8⁺ cells, CD4⁺ cells, NK-cells, delta-gamma T cells, regulatory T cells, or peripheral blood mononuclear cells form the adoptive cell therapeutic composition. In one embodiment, the adoptive cell therapeutic composition comprises T cells.

[0069] In some embodiments, the CAR expressed in the cell is a first generation, second generation, or third generation CAR, as described above. In accordance with the presently disclosed subject matter, the CARs of the engineered immune cells provided herein comprise an extracellular antigen-binding domain, a transmembrane domain, and an intracellular domain. WO 2019/032699 describes T cells co-expressing a CAR and an inducible bispecific antibody.

[0070] Comparable: As used herein, refers to two or more agents, entities, situations, sets of conditions, etc. that may not be identical to one another but that are sufficiently similar to permit comparison there between so that conclusions may reasonably be drawn based on differences or similarities observed. In some embodiments, comparable sets of conditions, circumstances, individuals, or populations are characterized by a plurality of substantially identical features and one or a small number of varied features. Those of ordinary skill in the art will understand, in context, what degree of identity is required in any given circumstance for two or more such agents, entities, situations, sets of conditions, etc. to be considered comparable. For example, those of ordinary skill in the art will appreciate that sets of circumstances, individuals, or populations are comparable to one another when characterized by a sufficient number and type of substantially identical features to warrant a reasonable conclusion that differences in results obtained or phenomena observed under or with different sets of circumstances, individuals, or populations are caused by or indicative of the variation in those features that are varied.

[0071] Control: As used herein, refers to the art-understood meaning of a “control” being a standard against which results are compared. Typically, controls are used to augment integrity in experiments by isolating variables in order to make a conclusion about such variables. In some embodiments, a control is a reaction or assay that is performed simultaneously with a test reaction or assay to provide a comparator. As used herein, a “control” may refer to a “control antibody”. A “control antibody” may be a human, chimeric, humanized, CDR-grafted, multispecific, or bispecific antibody as described herein, an antibody that is different as described herein, or a parental antibody. In one experiment, the “test” (i.e., the variable being tested) is applied. In the second experiment, the “control,” the variable being tested is not applied. In some embodiments, a control is a historical control (i.e., of a test or assay performed previously, or an amount or result that is previously known). In some embodiments, a control is or comprises a printed or otherwise saved record. A control may be a positive control or a negative control.

[0072] Corresponding to: As used herein designates the position/identity of an amino acid residue in a polypeptide of interest. Those of ordinary skill will appreciate that, for purposes of simplicity, residues in a polypeptide are often designated using a canonical numbering system based on a reference related polypeptide, so that an amino acid “corresponding to” a residue at position 190, for example, need not actually be the 190th amino acid in a particular amino acid chain but rather corresponds to the residue found at 190 in the reference polypeptide; those of ordinary skill in the art readily appreciate how to identify “corresponding” amino acids.

[0073] Detection entity/agent: As used herein, refers to any element, molecule, functional group, compound, fragment or moiety that is detectable. In some embodiments, a detection entity is provided or utilized alone. In some embodiments, a detection entity is provided and/or utilized in association with (e.g., joined to) another agent. Examples of detection entities include, but are not limited to: various ligands, radionuclides (e.g., 3H, 14C, 18F, 19F, 32P, 35S, 135I, 125I, 123I, 64Cu, 187Re, 111In, 90Y, 99mTc, 177Lu, 89Zr etc.), fluorescent dyes (for specific exemplary fluorescent dyes, see below), chemiluminescent agents (such as, for example, acridinum esters, stabilized dioxetanes, and the like), bioluminescent agents, spectrally resolvable inorganic fluorescent semiconductors nanocrystals (i.e., quantum dots), metal nanoparticles (e.g., gold, silver, copper, platinum, etc.) nanoclusters, paramagnetic metal ions, enzymes (for specific examples of enzymes, see below), colorimetric labels (such as, for example, dyes, colloidal gold, and the like), biotin, dioxigenin, haptens, and proteins for which antisera or monoclonal antibodies are available.

[0074] Effector function: As used herein refers a biochemical event that results from the interaction of an antibody Fc region with an Fc receptor or ligand. Effector functions include but are not limited to antibody-dependent cell-mediated cytotoxicity (ADCC), antibody-dependent cell-mediated phagocytosis (ADCP), and complement-mediated cytotoxicity (CMC). In some embodiments, an effector function is one that operates after the binding of an antigen, one that operates independent of antigen binding, or both.

[0075] Effector cell: As used herein refers to a cell of the immune system that mediates one or more effector functions. In some embodiments, effector cells may include, but may not be limited to, one or more of monocytes, macrophages, neutrophils, dendritic cells, eosinophils, mast cells, platelets, large granular lymphocytes, Langerhans' cells, natural killer (NK) cells, T-lymphocytes, B-lymphocytes and may be from any organism including but not limited to humans, mice, rats, rabbits, and monkeys.

[0076] Engineered: As used herein refers, in general, to the aspect of having been manipulated by the hand of man. For example, in some embodiments, a polynucleotide may be considered to be “engineered” when two or more sequences that are not linked together in that order in nature are manipulated by the hand of man to be directly linked to one another in the engineered polynucleotide. In some particular such embodiments, an engineered polynucleotide may comprise a regulatory sequence that is found in nature in operative association with a first coding sequence but not in operative association with a second coding sequence, is linked by the hand of man so that it is operatively associated with the second coding sequence. Alternatively or additionally, in some embodiments, first and second nucleic acid sequences that each encode polypeptide elements or domains that in nature are not linked to one another may be linked to one another in a single engineered polynucleotide. Comparably, in some embodiments, a cell or organism may be considered to be “engineered” if it has been manipulated so that its genetic information is altered (e.g., new genetic material not previously present has been introduced, or previously present genetic material has been altered or removed). As is common practice and is understood by those in the art, progeny of an engineered polynucleotide or cell are typically still referred to as “engineered” even though the actual manipulation was performed on a prior entity. Furthermore, as will be appreciated by those skilled in the art, a variety of methodologies are available through which “engineering” as described herein may be achieved. For example, in some embodiments, “engineering” may involve selection or design (e.g., of nucleic acid sequences, polypeptide sequences, cells, tissues, and/or organisms) through use of computer systems programmed to perform analysis or comparison, or otherwise to analyze, recommend, and/or select sequences, alterations, etc.). Alternatively or additionally, in some embodiments, “engineering” may involve use of in vitro chemical synthesis methodologies and/or recombinant nucleic acid technologies such as, for example, nucleic acid amplification (e.g., via the polymerase chain reaction) hybridization, mutation, transformation, transfection, etc., and/or any of a variety of controlled mating methodologies. As will be appreciated by those skilled in the art, a variety of established such techniques (e.g., for recombinant DNA, oligonucleotide synthesis, and tissue culture and transformation (e.g., electroporation, lipofection, etc.) are well known in the art and described in various general and more specific references that are cited and/or discussed throughout the present specification. See e.g., Sambrook et al., Molecular Cloning: A Laboratory Manual(2d ed., Cold Spring Harbor Laboratory Press, Cold Spring Harbor, N.Y., 1989).

[0077] Epitope: As used herein, includes any moiety that is specifically recognized by an immunoglobulin (e.g., antibody or receptor) binding component. In some embodiments, an epitope is comprised of a plurality of chemical atoms or groups on an antigen. In some embodiments, such chemical atoms or groups are surface-exposed when the antigen adopts a relevant three-dimensional conformation. In some embodiments, such chemical atoms or groups are physically near to each other in space when the antigen adopts such a conformation. In some embodiments, at least some such chemical atoms are groups are physically separated from one another when the antigen adopts an alternative conformation (e.g., is linearized). An antibody moiety described herein may bind to an epitope comprising between 7 and 50 amino acids (e.g., between 7 and 50 contiguous amino acids), e.g., between 7 and 45, between 7 and between 7 and 40, between 7 and 35, between 7 and 30, between 7 and 25, between 7 and 20, between 7 and 15, between 7 and 10, between 10 and 50, between 15 and 50, between 20 and 50, between 25 and 50, between 30 and 50, between 35 and 50, between 40 and 50, between 45 and 50, between 10 and 45, between 15 and 40, between 20 and 35, or between 25 and 30 amino acids.

[0078] Excipient: As used herein, refers to a non-therapeutic agent that may be included in a pharmaceutical composition, for example to provide or contribute to a desired consistency or stabilizing effect. Suitable pharmaceutical excipients include, for example, starch, glucose, lactose, sucrose, gelatin, malt, rice, flour, chalk, silica gel, sodium stearate, glycerol monostearate, talc, sodium chloride, dried skim milk, glycerol, propylene, glycol, water, ethanol and the like.

[0079] Expression cassette: As used herein, refers to a nucleic acid construct that, when introduced into a host cell, results in transcription and/or translation of an RNA or polypeptide, respectively.

[0080] Heterologous: As used herein, refers to a polynucleotide or polypeptide that does not naturally occur in a host cell or a host organism. A heterologous polynucleotide or polypeptide may be introduced into the host cell or host organism using well-known recombinant methods, e.g., using an expression cassette comprising the heterologous polynucleotide optionally linked to a promoter.

[0081] Framework or framework region: As used herein, refers to the sequences of a variable region minus the CDRs. Because a CDR sequence can be determined by different systems, likewise a framework sequence is subject to correspondingly different interpretations. The six CDRs divide the framework regions on the heavy and light chains into four sub-regions (FR1, FR2, FR3 and FR4) on each chain, in which CDR1 is positioned between FR1 and FR2, CDR2 between FR2 and FR3, and CDR3 between FR3 and FR4. Without specifying the particular sub-regions as FR1, FR2, FR3 or FR4, a framework region, as referred by others, represents the combined FRs within the variable region of a single, naturally occurring immunoglobulin chain. As used herein, a FR represents one of the four sub-regions, FR1, for example, represents the first framework region closest to the amino terminal end of the variable region and 5′ with respect to CDR1, and FRs represents two or more of the sub-regions constituting a framework region.

[0082] Host cell: As used herein, refers to a cell into which exogenous DNA (recombinant or otherwise) has been introduced. Persons of skill upon reading this disclosure will understand that such terms refer not only to the particular subject cell, but also to the progeny of such a cell. Because certain modifications may occur in succeeding generations due to either mutation or environmental influences, such progeny may not, in fact, be identical to the parent cell, but are still included within the scope of the term “host cell” as used herein. In some embodiments, host cells include prokaryotic and eukaryotic cells selected from any of the Kingdoms of life that are suitable for expressing an exogenous DNA (e.g., a recombinant nucleic acid sequence). Exemplary cells include those of prokaryotes and eukaryotes (single-cell or multiple-cell), bacterial cells (e.g., strains of E. coli, Bacillus spp., Streptomyces spp., etc.), mycobacteria cells, fungal cells, yeast cells (e.g., S. cerevisiae, S. pombe, P. pastoris, P. methanolica, etc.), plant cells, insect cells (e.g., SF-9, SF-21, baculovirus-infected insect cells, Trichoplusia ni, etc.), non-human animal cells, human cells, or cell fusions such as, for example, hybridomas or quadromas. In some embodiments, a host cell is a human, monkey, ape, hamster, rat, or mouse cell. In some embodiments, a host cell is eukaryotic and is selected from the following cells: CHO (e.g., CHO Kl, DXB-1 1 CHO, Veggie-CHO), COS (e.g., COS-7), retinal cell, Vero, CV1, kidney (e.g., HEK293, 293 EBNA, MSR293, MDCK, HaK, BHK), HeLa, HepG2, WI38, MRC 5, Colo205, HB 8065, HL-60, (e.g., BHK21), Jurkat, Daudi, A431 (epidermal), CV-1, U937, 3T3, L cell, C127 cell, SP2/0, NS-0, MMT 060562, Sertoli cell, BRL 3 A cell, HT1080 cell, myeloma cell, tumor cell, and a cell line derived from an aforementioned cell. In some embodiments, a host cell comprises one or more viral genes, e.g., a retinal cell that expresses a viral gene (e.g., a PER.C6™ cell).

[0083] Human antibody: As used herein, is intended to include antibodies having variable and constant regions generated (or assembled) from human immunoglobulin sequences. In some embodiments, antibodies (or antibody moieties) may be considered to be “human” even though their amino acid sequences include residues or elements not encoded by human germline immunoglobulin sequences (e.g., include sequence variations, for example, that may (originally) have been introduced by random or site-specific mutagenesis in vitro or by somatic mutation in vivo), for example in one or more CDRs and in particular CDR3. Human antibodies, human antibody moieties, and their fragments can be isolated from human immune cells or generated recombinantly or synthetically, including semi-synthetically.

[0084] Humanized: As is known in the art, the term “humanized” is commonly used to refer to antibodies (or moieties) whose amino acid sequence includes V_{H} and V_{L} region sequences from a reference antibody raised in a non-human species (e.g., a mouse), but also includes modifications in those sequences relative to the reference antibody intended to render them more “human-like”, i.e., more similar to human germline variable sequences. In some embodiments, a “humanized” antibody (or antibody moiety) is one that immunospecifically binds to an antigen of interest and that has a framework (FR) region having substantially the amino acid sequence as that of a human antibody, and a complementary determining region (CDR) having substantially the amino acid sequence as that of a non-human antibody. A humanized antibody comprises substantially all of at least one, and typically two, variable domains (Fab, Fab′, F(ab′)₂, FabC, Fv) in which all or substantially all of the CDR regions correspond to those of a non-human immunoglobulin (i.e., donor immunoglobulin) and all or substantially all of the framework regions are those of a human immunoglobulin consensus sequence. In some embodiments, a humanized antibody also comprises at least a portion of an immunoglobulin constant region (Fc), typically that of a human immunoglobulin constant region. In some embodiments, a humanized antibody contains both the light chain as well as at least the variable domain of a heavy chain. The antibody also may include a CHI, hinge, C_{H}2, C_{H}3, and, optionally, a C_{H}4 region of a heavy chain constant region. In some embodiments, a humanized antibody only contains a humanized V_{L} region. In some embodiments, a humanized antibody only contains a humanized V_{H} region. In some certain embodiments, a humanized antibody contains humanized V_{H} and V_{L} regions.

[0085] Hydrophilic: As used herein, the term “hydrophilic” and/or “polar” refers to a tendency to mix with, or dissolve easily in, water.

[0086] Hydrophobic: As used herein, the term “hydrophobic” and/or “non-polar”, refers to a tendency to repel, not combine with, or an inability to dissolve easily in, water.

[0087] Improve, increase, or reduce: As used herein, or grammatical equivalents thereof, indicate values that are relative to a baseline measurement, such as a measurement in the same individual prior to initiation of a treatment described herein, or a measurement in a control individual (or multiple control individuals) in the absence of the treatment described herein. A “control individual” is an individual afflicted with the same form of disease or injury as the individual being treated. In some embodiments, the methods for treating a cancer (e.g., a hematological cancer or a solid tumor cancer) using an immune cell described herein may increase cell apoptosis (e.g., increase tumor cell apoptosis) in an individual by at least 10%, at least 15%, at least 20%, at least 25%, at least 30%, at least 35%, at least 40%, at least 45%, at least 50%, at least 55%, at least 60%, at least 65%, at least 70%, at least 75%, at least 80%, at least 85%, or at least 90% compared to the individual prior to receiving treatment or to a control individual. In some embodiments, the methods for treating a cancer (e.g., a hematological cancer or a solid tumor cancer) using an immune cell described herein may reduce tumor size (e.g., reduce tumor size) in an individual by at least 10%, at least 15%, at least 20%, at least 25%, at least 30%, at least 35%, at least 40%, at least 45%, at least 50%, at least 55%, at least 60%, at least 65%, at least 70%, at least 75%, at least 80%, at least 85%, or at least 90% compared to the individual prior to receiving treatment or to a control individual.

[0088] In vitro: As used herein refers to events that occur in an artificial environment, e.g., in a test tube or reaction vessel, in cell culture, etc., rather than within a multi-cellular organism.

[0089] In vivo: As used herein refers to events that occur within a multi-cellular organism, such as a human and a non-human animal. In the context of cell-based systems, the term may be used to refer to events that occur within a living cell (as opposed to, for example, in vitro systems).

[0090] Isolated: As used herein, refers to a substance and/or entity that has been (1) separated from at least some of the components with which it was associated when initially produced (whether in nature and/or in an experimental setting), and/or (2) designed, produced, prepared, and/or manufactured by the hand of man. Isolated substances and/or entities may be separated from about 10%, about 20%, about 30%, about 40%, about 50%, about 60%, about 70%, about 80%, about 90%, about 91%, about 92%, about 93%, about 94%, about 95%, about 96%, about 97%, about 98%, about 99%, or more than about 99% of the other components with which they were initially associated. In some embodiments, isolated agents are about 80%, about 85%, about 90%, about 91%, about 92%, about 93%, about 94%, about 95%, about 96%, about 97%, about 98%, about 99%, or more than about 99% pure. As used herein, a substance is “pure” if it is substantially free of other components. In some embodiments, as will be understood by those skilled in the art, a substance may still be considered “isolated” or even “pure”, after having been combined with certain other components such as, for example, one or more carriers or excipients (e.g., buffer, solvent, water, etc.); in such embodiments, percent isolation or purity of the substance is calculated without including such carriers or excipients. To give but one example, in some embodiments, a biological polymer such as a polypeptide or polynucleotide that occurs in nature is considered to be “isolated” when, a) by virtue of its origin or source of derivation is not associated with some or all of the components that accompany it in its native state in nature; b) it is substantially free of other polypeptides or nucleic acids of the same species from the species that produces it in nature; c) is expressed by or is otherwise in association with components from a cell or other expression system that is not of the species that produces it in nature. Thus, for instance, in some embodiments, a polypeptide that is chemically synthesized or is synthesized in a cellular system different from that which produces it in nature is considered to be an “isolated” polypeptide. Alternatively or additionally, in some embodiments, a polypeptide that has been subjected to one or more purification techniques may be considered to be an “isolated” polypeptide to the extent that it has been separated from other components a) with which it is associated in nature; and/or b) with which it was associated when initially produced.

[0091] K_{D}: As used herein, refers to the dissociation constant of a binding agent (e.g., an antibody agent or binding component thereof) from a complex with its partner (e.g., the epitope to which the antibody agent or binding component thereof binds).

[0092] k_{off}: As used herein, refers to the off rate constant for dissociation of a binding agent (e.g., an antibody agent or binding component thereof) from a complex with its partner (e.g., the epitope to which the antibody agent or binding component thereof binds).

[0093] kₒₙ: As used herein, refers to the on rate constant for association of a binding agent (e.g., an antibody agent or binding component thereof) with its partner (e.g., the epitope to which the antibody agent or binding component thereof binds).

[0094] Linker: As used herein, is used to refer to that portion of a multi-element polypeptide that connects different elements to one another. For example, those of ordinary skill in the art appreciate that a polypeptide whose structure includes two or more functional or organizational domains often includes a stretch of amino acids between such domains that links them to one another. In some embodiments, a polypeptide comprising a linker element has an overall structure of the general form S1-L-S2, wherein S1 and S2 may be the same or different and represent two domains associated with one another by the linker. In some embodiments, a linker is at least 2, 3, 4, 5, 6, 7, 8, 9, 10, 11, 12, 13, 14, 15, 16, 17, 18, 19, 20, 21, 22, 23, 24, 25, 26, 27, 28, 29, 30, 35, 40, 45, 50, 55, 60, 65, 70, 75, 80, 85, 90, 95, 100 or more amino acids in length. In some embodiments, a linker has between 3 and 7 amino acids, between 7 and 15 amino acids, or between 20 and 30 (e.g., between 20 and 25 or between 25 and 30) amino acids. In some embodiments, a linker is characterized in that it tends not to adopt a rigid three-dimensional structure, but rather provides flexibility to the polypeptide. A variety of different linker elements that can appropriately be used when engineering polypeptides (e.g., fusion polypeptides) known in the art (see e.g., Holliger, P., et al., 1993, Proc. Natl. Acad. Sci. U.S.A. 90:6444-6448; Poljak, R. J. et al., 1994, Structure 2:1121-1123).

[0095] Multivalent binding antibody (or multispecific antibody): As used herein, refers an antibody capable of binding to two or more antigens, which can be on the same molecule or on different molecules. Multivalent binding antibodies as described herein are, in some embodiments, engineered to have the two or more antigen binding sites, and are typically not naturally occurring proteins. Multivalent binding antibodies as described herein refer to antibodies capable of binding two or more related or unrelated targets. Multivalent binding antibodies may be composed of multiple copies of a single antibody moiety or multiple copies of different antibody moieties. Such antibodies are capable of binding to two or more antigens and may be tetravalent or multivalent. Multivalent binding antibodies may additionally comprise a therapeutic agent, such as, for example, an immunomodulator, toxin or an RNase. Multivalent binding antibodies as described herein are, in some embodiments, capable of binding simultaneously to at least two targets that are of different structure, e.g., two different antigens, two different epitopes on the same antigen, or a hapten and/or an antigen or epitope. Multivalent binding antibodies of the present invention may be monospecific (capable of binding one antigen) or multispecific (capable of binding two or more antigens), and may be composed of two heavy chain polypeptides and two light chain polypeptides. Each binding site, in some embodiments, is composed of a heavy chain variable domain and a light chain variable domain with a total of six CDRs involved in antigen binding per antigen binding site.

[0096] Nucleic acid: As used herein, in its broadest sense, refers to any compound and/or substance that is or can be incorporated into an oligonucleotide chain. In some embodiments, a nucleic acid is a compound and/or substance that is or can be incorporated into an oligonucleotide chain via a phosphodiester linkage. As will be clear from context, in some embodiments, “nucleic acid” refers to individual nucleic acid residues (e.g., nucleotides and/or nucleosides); in some embodiments, “nucleic acid” refers to an oligonucleotide chain comprising individual nucleic acid residues. In some embodiments, a “nucleic acid” is or comprises RNA; in some embodiments, a “nucleic acid” is or comprises DNA. In some embodiments, a nucleic acid is, comprises, or consists of one or more natural nucleic acid residues. In some embodiments, a nucleic acid is, comprises, or consists of one or more nucleic acid analogs. In some embodiments, a nucleic acid analog differs from a nucleic acid in that it does not utilize a phosphodiester backbone. For example, in some embodiments, a nucleic acid is, comprises, or consists of one or more “peptide nucleic acids”, which are known in the art and have peptide bonds instead of phosphodiester bonds in the backbone, are considered within the scope of the present invention. Alternatively or additionally, in some embodiments, a nucleic acid has one or more phosphorothioate and/or 5′-N-phosphoramidite linkages rather than phosphodiester bonds.

[0097] In some embodiments, a nucleic acid is, comprises, or consists of one or more natural nucleosides (e.g., adenosine, thymidine, guanosine, cytidine, uridine, deoxyadenosine, deoxythymidine, deoxy guanosine, and deoxycytidine). In some embodiments, a nucleic acid is, comprises, or consists of one or more nucleoside analogs (e.g., 2-aminoadenosine, 2-thiothymidine, inosine, pyrrolo-pyrimidine, 3-methyl adenosine, 5-methylcytidine, C-5 propynyl-cytidine, C-5 propynyl-uridine, 2-aminoadenosine, C5-bromouridine, C5-fluorouridine, C5-iodouridine, C5-propynyl-uridine, C5-propynyl-cytidine, C5-methylcytidine, 2-aminoadenosine, 7-deazaadenosine, 7-deazaguanosine, 8-oxoadenosine, 8-oxoguanosine, 0(6)-methylguanine, 2-thiocytidine, methylated bases, intercalated bases, and combinations thereof). In some embodiments, a nucleic acid comprises one or more modified sugars (e.g., 2′-fluororibose, ribose, 2′-deoxyribose, arabinose, and hexose) as compared with those in natural nucleic acids. In some embodiments, a nucleic acid has a nucleotide sequence that encodes a functional gene product such as an RNA or protein. In some embodiments, a nucleic acid includes one or more introns. In some embodiments, nucleic acids are prepared by one or more of isolation from a natural source, enzymatic synthesis by polymerization based on a complementary template (in vivo or in vitro), reproduction in a recombinant cell or system, and chemical synthesis. In some embodiments, a nucleic acid is at least 3, 4, 5, 6, 7, 8, 9, 10, 15, 20, 25, 30, 35, 40, 45, 50, 55, 60, 65, 70, 75, 80, 85, 90, 95, 100, 110, 120, 130, 140, 150, 160, 170, 180, 190, 20, 225, 250, 275, 300, 325, 350, 375, 400, 425, 450, 475, 500, 600, 700, 800, 900, 1000, 1500, 2000, 2500, 3000, 3500, 4000, 4500, 5000 or more residues long. In some embodiments, a nucleic acid is single stranded; in some embodiments, a nucleic acid is double stranded. In some embodiments a nucleic acid has a nucleotide sequence comprising at least one element that encodes, or is the complement of a sequence that encodes, a polypeptide. In some embodiments, a nucleic acid has enzymatic activity.

[0098] Operably linked: As used herein, refers to a juxtaposition wherein the components described are in a relationship permitting them to function in their intended manner. A control sequence “operably linked” to a coding sequence is ligated in such a way that expression of the coding sequence is achieved under conditions compatible with the control sequences. “Operably linked” sequences include both expression control sequences that are contiguous with a gene of interest and expression control sequences that act in trans or at a distance to control said gene of interest. The term “expression control sequence” as used herein refers to polynucleotide sequences that are necessary to effect the expression and processing of coding sequences to which they are ligated. Expression control sequences include appropriate transcription initiation, termination, promoter and enhancer sequences; efficient RNA processing signals such as splicing and polyadenylation signals; sequences that stabilize cytoplasmic mRNA; sequences that enhance translation efficiency (i.e., Kozak consensus sequence); sequences that enhance protein stability; and when desired, sequences that enhance protein secretion. The nature of such control sequences differs depending upon the host organism. For example, in prokaryotes, such control sequences generally include promoter, ribosomal binding site, and transcription termination sequence, while in eukaryotes, typically, such control sequences include promoters and transcription termination sequence. The term “control sequences” is intended to include components whose presence is essential for expression and processing, and can also include additional components whose presence is advantageous, for example, leader sequences and fusion partner sequences.

[0099] Physiological conditions: As used herein, has its art-understood meaning referencing conditions under which cells or organisms live and/or reproduce. In some embodiments, the term refers to conditions of the external or internal milieu that may occur in nature for an organism or cell system. In some embodiments, physiological conditions are those conditions present within the body of a human or non-human animal, especially those conditions present at and/or within a surgical site. Physiological conditions typically include, e.g., a temperature range of 20-40° C., atmospheric pressure of 1, pH of 6-8, glucose concentration of 1-20 mM, oxygen concentration at atmospheric levels, and gravity as it is encountered on earth. In some embodiments, conditions in a laboratory are manipulated and/or maintained at physiologic conditions. In some embodiments, physiological conditions are encountered in an organism.

[0100] Polypeptide: As used herein, refers to any polymeric chain of amino acids. In some embodiments, the amino acids are joined to each other by peptide bonds or modified peptide bonds. In some embodiments, a polypeptide has an amino acid sequence that occurs in nature. In some embodiments, a polypeptide has an amino acid sequence that does not occur in nature. In some embodiments, a polypeptide has an amino acid sequence that is engineered in that it is synthetically designed and/or produced. In some embodiments, a polypeptide may comprise or consist of natural amino acids, non-natural amino acids, or both. In some embodiments, a polypeptide may comprise or consist of only natural amino acids or only non-natural amino acids. In some embodiments, a polypeptide may comprise D-amino acids, L-amino acids, or both. In some embodiments, a polypeptide may comprise only D-amino acids. In some embodiments, a polypeptide may comprise only L-amino acids.

[0101] In some embodiments, a polypeptide may include one or more pendant groups or other modifications, e.g., modifying or attached to one or more amino acid side chains, at the polypeptide's N-terminus, at the polypeptide's C-terminus, or any combination thereof. In some embodiments, such pendant groups or modifications may be selected from the group consisting of acetylation, amidation, lipidation, methylation, pegylation, etc., including combinations thereof. In some embodiments, a polypeptide may be cyclic, and/or may comprise a cyclic portion. In some embodiments, a polypeptide is not cyclic and/or does not comprise any cyclic portion. In some embodiments, a polypeptide is linear. In some embodiments, a polypeptide may be or comprise a stapled polypeptide. In some embodiments, the term “polypeptide” may be appended to a name of a reference polypeptide, activity, or structure; in such instances it is used herein to refer to polypeptides that share the relevant activity or structure and thus can be considered to be members of the same class or family of polypeptides. For each such class, the present specification provides and/or those skilled in the art will be aware of exemplary polypeptides within the class whose amino acid sequences and/or functions are known; in some embodiments, such exemplary polypeptides are reference polypeptides for the polypeptide class.

[0102] In some embodiments, a member of a polypeptide class or family shows significant sequence homology or identity with, shares a common sequence motif (e.g., a characteristic sequence element) with, and/or shares a common activity (in some embodiments at a comparable level or within a designated range) with a reference polypeptide of the class; in some embodiments with all polypeptides within the class). For example, in some embodiments, a member polypeptide shows an overall degree of sequence homology or identity with a reference polypeptide that is at least about 30 to 40%, and is often greater than about 50%, 60%, 70%, 80%, 90%, 91%, 92%, 93%, 94%, 95%, 96%, 97%, 98%, 99% or more and/or includes at least one region (i.e., a conserved region that may in some embodiments may be or comprise a characteristic sequence element) that shows very high sequence identity, often greater than 90% or even 95%, 96%, 97%, 98%, or 99%. Such a conserved region usually encompasses at least three to four and often up to 20 or more amino acids; in some embodiments, a conserved region encompasses at least one stretch of at least 2, 3, 4, 5, 6, 7, 8, 9, 10, 11, 12, 13, 14, 15 or more contiguous amino acids. In some embodiments, a useful polypeptide may comprise or consist of a fragment of a parent polypeptide. In some embodiments, a useful polypeptide as may comprise or consist of a plurality of fragments, each of which is found in the same parent polypeptide in a different spatial arrangement relative to one another than is found in the polypeptide of interest (e.g., fragments that are directly linked in the parent may be spatially separated in the polypeptide of interest or vice-versa, and/or fragments may be present in a different order in the polypeptide of interest than in the parent), so that the polypeptide of interest is a derivative of its parent polypeptide.

[0103] Prevent or prevention: As used herein when used in connection with the occurrence of a disease, disorder, and/or condition, refers to reducing the risk of developing the disease, disorder and/or condition and/or to delaying onset of one or more characteristics or symptoms of the disease, disorder or condition. Prevention may be considered complete when onset of a disease, disorder or condition has been delayed for a predefined period of time.

[0104] Recombinant: As used herein, is intended to refer to polypeptides (e.g., antibodies or antibody moieties) that are designed, engineered, prepared, expressed, created or isolated by recombinant means, such as polypeptides expressed using a recombinant expression vector transfected into a host cell, polypeptides isolated from a recombinant, combinatorial human polypeptide library (Hoogenboom H. R., 1997, TIB Tech. 15:62-70; Azzazy H., and Highsmith W. E., 2002, Clin. Biochem. 35:425-45; Gavilondo J. V., and Larrick J. W., 2002, BioTechniques 29:128-45; Hoogenboom H., and Chames P., 2000, Immunol. Today 21:371-8), antibodies isolated from an animal (e.g., a mouse) that is transgenic for human immunoglobulin genes (see e.g., Taylor, L. D., et al., 1992, Nucl. Acids Res. 20:6287-95; Kellermann S-A., and Green L. L., 2002, Curr. Opin. Biotech. 13:593-7; Little, M. et al., 2000, Immunol. Today 21:364-70; Murphy, A. J. et al., 2014, Proc. Natd. Acad. Sci. U.S.A. 111(14):5153-8) or polypeptides prepared, expressed, created or isolated by any other means that involves splicing selected sequence elements to one another. In some embodiments, one or more of such selected sequence elements is found in nature. In some embodiments, one or more of such selected sequence elements is designed in silico. In some embodiments, one or more such selected sequence elements results from mutagenesis (e.g., in vivo or in vitro) of a known sequence element, e.g., from a natural or synthetic source. For example, in some embodiments, a recombinant antibody is comprised of sequences found in the germline of a source organism of interest (e.g., human, mouse, etc.). In some embodiments, a recombinant antibody has an amino acid sequence that resulted from mutagenesis (e.g., in vitro or in vivo, for example in a transgenic animal), so that the amino acid sequences of the V_{H} and V_{L} regions of the recombinant antibodies are sequences that, while originating from and related to germline V_{H} and V_{L} sequences, may not naturally exist within the germline antibody repertoire in vivo.

[0105] Reference: As used herein describes a standard, control, or other appropriate reference against which a comparison is made as described herein. For example, in some embodiments, a reference is a standard or control agent, animal, individual, population, sample, sequence, series of steps, set of conditions, or value against which an agent, animal, individual, population, sample, sequence, series of steps, set of conditions, or value of interest is compared. In some embodiments, a reference is tested and/or determined substantially simultaneously with the testing or determination of interest. In some embodiments, a reference is a historical reference, optionally embodied in a tangible medium. Typically, as would be understood by those skilled in the art, a reference is determined or characterized under conditions comparable to those utilized in the assessment of interest.

[0106] Specific binding: As used herein, refers to a binding agent's ability to discriminate between possible partners in the environment in which binding is to occur. A binding agent that interacts with one particular target when other potential targets are present is said to “bind specifically” to the target with which it interacts. In some embodiments, specific binding is assessed by detecting or determining degree of association between the binding agent and its partner; in some embodiments, specific binding is assessed by detecting or determining degree of dissociation of a binding agent-partner complex; in some embodiments, specific binding is assessed by detecting or determining ability of the binding agent to compete an alternative interaction between its partner and another entity. In some embodiments, specific binding is assessed by performing such detections or determinations across a range of concentrations. In some embodiments, specific binding is assessed by determining the difference in binding affinity between cognate and non-cognate targets. For example, a binding agent may have a binding affinity for a cognate target that is about 3-fold, 4-fold, 5-fold, 6-fold, 7-fold, 8-fold, 9-fold, 10-fold or more than binding affinity for a non-cognate target.

[0107] Specificity: As is known in the art, “specificity” is a measure of the ability of a particular ligand to distinguish its binding partner from other potential binding partners.

[0108] Subject: As used herein, means any mammal, including humans. In certain embodiments of the present invention the subject is an adult, an adolescent or an infant. In some embodiments, terms “individual” or “patient” are used and are intended to be interchangeable with “subject.” Also contemplated by the present invention are the administration of the pharmaceutical compositions and/or performance of the methods of treatment in utero.

[0109] Substantially: As used herein, the term “substantially” refers to the qualitative condition of exhibiting total or near-total extent or degree of a characteristic or property of interest. One of ordinary skill in the biological arts will understand that biological and chemical phenomena rarely, if ever, go to completion and/or proceed to completeness or achieve or avoid an absolute result. The term “substantially” is therefore used herein to capture the potential lack of completeness inherent in many biological and chemical phenomena.

[0110] Substantial sequence homology: As used herein, the phrase “substantial homology” to refers to a comparison between amino acid or nucleic acid sequences. As will be appreciated by those of ordinary skill in the art, two sequences are generally considered to be “substantially homologous” if they contain homologous residues in corresponding positions. Homologous residues may be identical residues. Alternatively, homologous residues may be non-identical residues with appropriately similar structural and/or functional characteristics. For example, as is well known by those of ordinary skill in the art, certain amino acids are typically classified as “hydrophobic” or “hydrophilic” amino acids, and/or as having “polar” or “non-polar” side chains. Substitution of one amino acid for another of the same type may often be considered a “homologous” substitution. Typical amino acid categorizations are summarized as follows:

| | | | | | |
|---|---|---|---|---|---|
| Alanine | Ala | A | Nonpolar | Neutral | 1.8 |
| Arginine | Arg | R | Polar | Positive | −4.5 |
| Asparagine | Asn | N | Polar | Neutral | −3.5 |
| Aspartic acid | Asp | D | Polar | Negative | −3.5 |
| Cysteine | Cys | C | Nonpolar | Neutral | 2.5 |
| Glutamic acid | Glu | E | Polar | Negative | −3.5 |
| Glutamine | Gln | Q | Polar | Neutral | −3.5 |
| Glycine | Gly | G | Nonpolar | Neutral | −0.4 |
| Histidine | His | H | Polar | Positive | −3.2 |
| Isoleucine | He | I | Nonpolar | Neutral | 4.5 |
| Leucine | Leu | L | Nonpolar | Neutral | 3.8 |
| Lysine | Lys | K | Polar | Positive | −3.9 |
| Methionine | Met | M | Nonpolar | Neutral | 1.9 |
| Phenylalanine | Phe | F | Nonpolar | Neutral | 2.8 |
| Proline | Pro | P | Nonpolar | Neutral | −1.6 |
| Serine | Ser | S | Polar | Neutral | −0.8 |
| Threonine | Thr | T | Polar | Neutral | −0.7 |
| Tryptophan | Trp | W | Nonpolar | Neutral | −0.9 |
| Tyrosine | Tyr | Y | Polar | Neutral | −1.3 |
| Valine | Val | V | Nonpolar | Neutral | 4.2 |

| Ambiguous Amino Acids | 3-Letter | 1-Letter |
|---|---|---|
| Asparagine or aspartic acid | Asx | B |
| Glutamine or glutamic acid | Glx | Z |
| Leucine or Isoleucine | Xie | J |
| Unspecified or unknown | Xaa | X |
| amino acid | | |

[0111] As is well known in this art, amino acid or nucleic acid sequences may be compared using any of a variety of algorithms, including those available in commercial computer programs such as BLASTN for nucleotide sequences and BLASTP, gapped BLAST, and PSI-BLAST for amino acid sequences. Exemplary such programs are described in Altschul et al., 1990, J. Mol. Biol., 215(3):403-410; Altschul et al., 1996, Meth. Enzymology 266:460-480; Altschul et al., 1997, Nucleic Acids Res. 25:3389-3402; Baxevanis et al, Bioinformatics: A Practical Guide to the Analysis of Genes and Proteins, Wiley, 1998; and Misener, et al, (eds.), Bioinformatics Methods and Protocols (Methods in Molecular Biology, Vol. 132), Humana Press, 1999. In addition to identifying homologous sequences, the programs mentioned above typically provide an indication of the degree of homology. In some embodiments, two sequences are considered to be substantially homologous if at least 50%, at least 55%, at least 60%, at least 65%, at least 70%, at least 75%, at least 80%, at least 85%, at least 90%, at least 91%, at least 92%, at least 93%, at least 94%, at least 95%, at least 96%, at least 97%, at least 98%, at least 99% or more of their corresponding residues are homologous over a relevant stretch of residues. In some embodiments, the relevant stretch is a complete sequence. In some embodiments, the relevant stretch is at least 10, at least 15, at least 20, at least 25, at least 30, at least 35, at least 40, at least 45, at least 50, at least 55, at least 60, at least 65, at least 70, at least 75, at least 80, at least 85, at least 90, at least 95, at least 100, at least 125, at least 150, at least 175, at least 200, at least 225, at least 250, at least 275, at least 300, at least 325, at least 350, at least 375, at least 400, at least 425, at least 450, at least 475, at least 500 or more residues.

[0112] Surface plasmon resonance: As used herein, refers to an optical phenomenon that allows for the analysis of specific binding interactions in real-time, for example through detection of alterations in protein concentrations within a biosensor matrix, such as by using a BIAcore system (Pharmacia Biosensor AB, Uppsala, Sweden and Piscataway, N.J.). For further descriptions, see Jonsson, U. et al., 1993, Ann. Biol. Clin. 51:19-26; Jonsson, U. et al., 1991, Biotechniques 11:620-627; Johnsson, B. et al., 1995, J. Mol. Recognit. 8:125-131; and Johnsson, B. et al., 1991, Anal. Biochem. 198:268-277.

[0113] Therapeutic agent: As used herein, generally refers to any agent that elicits a desired pharmacological effect when administered to an organism. In some embodiments, an agent is considered to be a therapeutic agent if it demonstrates a statistically significant effect across an appropriate population. In some embodiments, the appropriate population may be a population of model organisms. In some embodiments, an appropriate population may be defined by various criteria, such as a certain age group, gender, genetic background, preexisting clinical conditions, etc. In some embodiments, a therapeutic agent is a substance that can be used to alleviate, ameliorate, relieve, inhibit, prevent, delay onset of, reduce severity of, and/or reduce incidence of one or more symptoms or features of a disease, disorder, and/or condition. In some embodiments, a “therapeutic agent” is an agent that has been or is required to be approved by a government agency before it can be marketed for administration to humans. In some embodiments, a “therapeutic agent” is an agent for which a medical prescription is required for administration to humans.

[0114] Therapeutically effective amount: As used herein, is meant an amount that produces the desired effect for which it is administered. In some embodiments, the term refers to an amount that is sufficient, when administered to a population suffering from or susceptible to a disease, disorder, and/or condition in accordance with a therapeutic dosing regimen, to treat the disease, disorder, and/or condition. In some embodiments, a therapeutically effective amount is one that reduces the incidence and/or severity of, and/or delays onset of, one or more symptoms of the disease, disorder, and/or condition. Those of ordinary skill in the art will appreciate that the term “therapeutically effective amount” does not in fact require successful treatment be achieved in a particular individual. Rather, a therapeutically effective amount may be that amount that provides a particular desired pharmacological response in a significant number of subjects when administered to patients in need of such treatment. In some embodiments, reference to a therapeutically effective amount may be a reference to an amount as measured in one or more specific tissues (e.g., a tissue affected by the disease, disorder or condition) or fluids (e.g., blood, saliva, serum, sweat, tears, urine, etc.). Those of ordinary skill in the art will appreciate that, in some embodiments, a therapeutically effective amount of a particular agent or therapy may be formulated and/or administered in a single dose. In some embodiments, a therapeutically effective agent may be formulated and/or administered in a plurality of doses, for example, as part of a dosing regimen.

[0115] Treatment: As used herein, the term “treatment” (also “treat” or “treating”), in its broadest sense, refers to any administration of a substance (e.g., provided compositions) that partially or completely alleviates, ameliorates, relives, inhibits, delays onset of, reduces severity of, and/or reduces incidence of one or more symptoms, features, and/or causes of a particular disease, disorder, and/or condition. In some embodiments, such treatment may be administered to a subject who does not exhibit signs of the relevant disease, disorder and/or condition and/or of a subject who exhibits only early signs of the disease, disorder, and/or condition. Alternatively or additionally, in some embodiments, treatment may be administered to a subject who exhibits one or more established signs of the relevant disease, disorder and/or condition. In some embodiments, treatment may be of a subject who has been diagnosed as suffering from the relevant disease, disorder, and/or condition. In some embodiments, treatment may be of a subject known to have one or more susceptibility factors that are statistically correlated with increased risk of development of the relevant disease, disorder, and/or condition.

[0116] Variant: As used herein, the term “variant” refers to an entity that shows significant structural identity with a reference entity but differs structurally from the reference entity in the presence or level of one or more chemical moieties as compared with the reference entity. In many embodiments, a variant also differs functionally from its reference entity. In general, whether a particular entity is properly considered to be a “variant” of a reference entity is based on its degree of structural identity with the reference entity. As will be appreciated by those skilled in the art, any biological or chemical reference entity has certain characteristic structural elements. A variant, by definition, is a distinct chemical entity that shares one or more such characteristic structural elements. To give but a few examples, a polypeptide may have a characteristic sequence element comprised of a plurality of amino acids having designated positions relative to one another in linear or three-dimensional space and/or contributing to a particular biological function, a nucleic acid may have a characteristic sequence element comprised of a plurality of nucleotide residues having designated positions relative to on another in linear or three-dimensional space. For example, a variant polypeptide may differ from a reference polypeptide as a result of one or more differences in amino acid sequence and/or one or more differences in chemical moieties (e.g., carbohydrates, lipids, etc.) covalently attached to the polypeptide backbone. In some embodiments, a variant polypeptide shows an overall sequence identity with a reference polypeptide that is at least 85%, 86%, 87%, 88%, 89%, 90%, 91%, 92%, 93%, 94%, 95%, 96%, 97%, or 99%. Alternatively or additionally, in some embodiments, a variant polypeptide does not share at least one characteristic sequence element with a reference polypeptide.

[0117] In some embodiments, the reference polypeptide has one or more biological activities. In some embodiments, a variant polypeptide shares one or more of the biological activities of the reference polypeptide. In some embodiments, a variant polypeptide lacks one or more of the biological activities of the reference polypeptide. In some embodiments, a variant polypeptide shows a reduced level of one or more biological activities as compared with the reference polypeptide. In many embodiments, a polypeptide of interest is considered to be a “variant” of a parent or reference polypeptide if the polypeptide of interest has an amino acid sequence that is identical to that of the parent but for a small number of sequence alterations at particular positions. Typically, fewer than 20%, 15%, 10%, 9%, 8%, 7%, 6%, 5%, 4%, 3%, 2% of the residues in the variant are substituted as compared with the parent. In some embodiments, a variant has 10, 9, 8, 7, 6, 5, 4, 3, 2, or 1 substituted residue as compared with a parent. Often, a variant has a very small number (e.g., fewer than 5, 4, 3, 2, or 1) number of substituted functional residues (i.e., residues that participate in a particular biological activity). Furthermore, a variant typically has not more than 5, 4, 3, 2, or 1 insertions or deletions, and often has no insertions or deletions, as compared with the parent. Moreover, any additions or deletions are typically fewer than about 25, about 20, about 19, about 18, about 17, about 16, about 15, about 14, about 13, about 10, about 9, about 8, about 7, about 6, and commonly are fewer than about 5, about 4, about 3, or about 2 residues. In some embodiments, the parent or reference polypeptide is one found in nature. As will be understood by those of ordinary skill in the art, a plurality of variants of a particular polypeptide of interest may commonly be found in nature, particularly when the polypeptide of interest is an infectious agent polypeptide.

[0118] Vector: As used herein, refers to a nucleic acid molecule capable of transporting another nucleic acid to which it has been linked. One type of vector is a “plasmid”, which refers to a circular double stranded DNA loop into which additional DNA segments may be ligated. Another type of vector is a viral vector, wherein additional DNA segments may be ligated into the viral genome. Certain vectors are capable of autonomous replication in a host cell into which they are introduced (e.g., bacterial vectors having a bacterial origin of replication and episomal mammalian vectors). Other vectors (e.g., non-episomal mammalian vectors) can be integrated into the genome of a host cell upon introduction into the host cell, and thereby are replicated along with the host genome. Moreover, certain vectors are capable of directing the expression of genes to which they are operatively linked. Such vectors are referred to herein as “expression vectors.”

[0119] Wild type: As used herein, the term “wild type” has its art-understood meaning that refers to an entity having a structure and/or activity as found in nature in a “normal” (as contrasted with mutant, variant, diseased, altered, etc.) state or context. Those of ordinary skill in the art will appreciate that wild type genes and polypeptides often exist in multiple different forms (e.g., alleles).

### BRIEF DESCRIPTION OF THE DRAWINGS

[0120] FIG. 1: T cell-mediated short-term target cell killing by T cells expressing (1) anti-AFP-CD28z-CAR; (2) anti-AFP-CD28z-CAR+anti-GPC3-CD30-CSR; (3) anti-AFP-CD8T-z-CAR; or (4) anti-AFP-CD8T-z-CAR+anti-GPC3-CD30-CSR.

[0121] FIGS. 2A and 2B: T cells expressing (1) anti-AFP-CD28z-CAR; (2) anti-AFP-CD28z-CAR+anti-GPC3-CD30-CSR; (3) anti-AFP-CD8T-z-CAR; or (4) anti-AFP-CD8T-z-CAR+anti-GPC3-CD30-CSR had much higher IFNγ (FIG. 2A) and Granzyme B (FIG. 2B) (both indicators for T cell activities/killing capability) secretion levels than corresponding CAR T cells without CSR.

[0122] FIGS. 3A and 3B: The results of T cell survival and killing of target HepG2 (A2⁺/AFP⁺/GPC3⁺) cells mediated by T cells expressing 1^{st} generation CAR constructs: (1) anti-AFP-CD8T-z-CAR; (2) anti-AFP-CD8T-z-CAR+anti-GPC3-CD28-CSR; or (3) anti-AFP-CD8T-z-CAR+anti-GPC3-CD30-CSR. T cells expressing anti-AFP-CD8T-z-CAR+anti-GPC3-CD28-CSR or anti-AFP-CD8-z-CAR+anti-GPC3-CD30-CSR survived much better than mock-transduced T cells and T cells expressing only the corresponding CARs (FIG. 3A). Further, T cells expressing anti-AFP-CD8T-z-CAR+anti-GPC3-CD28-CSR or anti-AFP-CD8-z-CAR+anti-GPC3-CD30-CSR killed many more target cells than T cell expressing only the corresponding CARs (FIG. 3B).

[0123] FIGS. 3C and 3D: The results of T cell survival and killing of target HepG2 (A2⁺/AFP⁺/GPC3⁺) cells mediated by T cells expressing 2^{nd} generation CAR constructs: (1) anti-AFP-CD28z-CAR; (2) anti-AFP-CD28z-CAR+anti-GPC3-CD28-CSR; or (3) anti-AFP-CD28z-CAR+anti-GPC3-CD30-CSR. T cells expressing anti-AFP-CD28z-CAR+anti-GPC3-CD28-CSR or anti-AFP-CD28z-CAR+anti-GPC3-CD30-CSR survived much better than mock-transduced T cells and T cells expressing only the corresponding CARs (FIG. 3C). Further, T cells expressing anti-AFP-CD28z-CAR+anti-GPC3-CD28-CSR or anti-AFP-CD28z-CAR+anti-GPC3-CD30-CSR killed many more target cells than T cell expressing only the corresponding CARs (FIG. 3D).

[0124] FIG. 4: Images of tumor sections stained with anti-CD3 antibody to visualize T cells in tumors dissected from mice adminstered with: (1) mock-transduced T cells; (2) T cells expressing αAFP-CD28z-CAR; (3) T cells expressing αAFP-CD28z-CAR+αGPC3-CD28-CSR; or (4) T cells expressing αAFP-CD28z-CAR+αGPC3-CD30-CSR. The blue cells are tumor cells which represent all the cells in the “Mock” image, while the brown cells are T cells which represent less than 5% of all the cells in the “αAFP-CD28z-CAR” image, about a third of all the cells in the “αAFP-CD28z-CAR+αGPC3-CD28-CSR” image, and about half of all the cells in the “αAFP-CD28z-CAR+αGPC3-CD30-CSR” image.

[0125] FIG. 5: Quantification of the percentages of CD3⁺ cells (T cells) among all cells (including tumor cells and CD3⁺ cells) in multiple tumor sections from HepG-implanted mice that were later treated with T cells expressing (1) αAFP-CD28z-CAR; (2) αAFP-CD28z-CAR+αGPC3-CD28-CSR; or (3) αAFP-CD28z-CAR+αGPC3-CD30-CSR.

[0126] FIG. 6: Images of tumor sections stained with anti-CD3 antibody to visualize T cells in tumors dissected from mice adminstered with: (1) mock-transduced T cells; (2) T cells expressing αGPC3-CD28z-CAR; or (3) T cells expressing αGPC3-CD28z-CAR+αGPC3-CD30-CSR. The blue cells are tumor cells which represent all the cells in the “Mock” image, while the brown cells are T cells which represent about a quarter of all the cells in the “αGPC3-CD28z-CAR” image and about half of all the cells in the “αGPC3-CD28z-CAR+αGPC3-CD30-CSR” image.

[0127] FIG. 7: Quantification of the percentages of CD3⁺ cells (T cells) among all cells (including tumor cells and CD3⁺ cells) in multiple tumor sections from HepG-implanted mice that were later treated with T cells expressing (Group 1) αGPC3-CD28z-CAR; (Group 2) αGPC3-CD30T-CD28-CSR; or (Group 3) αGPC3-CD28z-CAR+αGPC3-CD30-CSR.

[0128] FIGS. 8A and 8B: T cells expressing anti-CD19-CD8T-41BBz-CAR+anti-CD19-CD28T-CD30-CSR or anti-CD19-CD8T-z-CAR+anti-CD19-CD30-CSR had higher IFNγ (an indicator for T cell activities/killing capability) secretion level than corresponding T cells expressing anti-CD19-CD8T-41BBz-CAR+anti-CD19-CD28T-41BB-CSR or anti-CD19-CD8T-z-CAR+anti-CD19-CD28-CSR.

[0129] FIG. 9: T cells expressing anti-ROR1-CD8T-41BBz-CAR+anti-ROR1-CD28T-CD30-CSR (“tCD30”) had significant ROR1-specific cell killing capability against all six tested cancer cell lines (measured by IFNγ release level) as compared to the mock-transduced T cells, and their cell killing capability is comparable to or better than that of corresponding CAR T cells co-expressing a CSR comprising a 4-1BB costimulatory domain (“t41BB”).

[0130] FIGS. 10A-10D: Survival of αROR1-CD8T-41BBz-CAR+αROR1-CD28T-CD30-CSR T cells (“tCD30”) and αROR1-CD8T-41BBz-CAR+αROR1-CD28T-41BB-CSR T cells (“t41BB”) over multiple challenges by cancer cell lines MDA-MB-231, A549, H1975, and H1703, respectively. The Total Cell #s shown are T cell numbers.

### DETAILED DESCRIPTION OF THE EMBODIMENTS

[0131] Adoptive T cell immunotherapy, in which a patient's own T lymphocytes are engineered to express chimeric antigen receptors (CARs), has shown great promise in treating hematological malignancies, but not so much in solid tumors. In addition, CAR by itself is generally not efficacious enough, especially for solid tumors, even with the commonly used costimulatory fragments, no matter if expressed in cis or in trans. Therefore, more efficacious and longer-lasting T cell immunotherapies are needed.

[0132] We disclose herein that co-expression of CAR and CSR, in particular a CSR comprising a CD30 costimulatory fragment, will benefit any CAR T cell that targets a low-density antigen. Most MHC-restricted peptide antigens and solid tumor antigens are of low-density. However, even some blood cancer related cell-surface antigens, e.g., CD22, are of low-density. When used to treat solid tumors, T cells expressing CAR and CD30-CSR have increased tumor infiltration.

[0133] The present invention relates to the discovery of CSRs that use a costimulatory domain from CD30 (also referred to herein as a CD30 costimulatory domain) and T cells expressing these CSRs and CARs have far less expression of PD-1, an inhibitor of T cell activation, than T cells with the same CARs and CSRs containing a costimulatory domain from, e.g., CD28 or 4-1BB. In some embodiments, T cells with CSRs containing a costimulatory domain from CD30 express far less PD-1 than T cells with CSRs containing a costimulatory domain from Dap10. The T cells with CARs and CSRs comprising a CD30 costimulatory domain provide superior persistence of tumor cell killing. The invention also provides the use of such T cells to treat cancer (e.g., a hematological cancer or a solid tumor cancer).

[0134] I. Chimeric Antigen Receptors (CARs)

[0135] The disclosure provides immune cells comprising: a chimeric antigen receptor (CAR) and a chimeric stimulating receptor (CSR). The CAR comprises (i) an extracellular target-binding domain comprising an antibody moiety (a CAR antibody moiety); (ii) a transmembrane domain (a CAR transmembrane domain); and (iii) a primary signaling domain. In some embodiments, the CAR further comprises a costimulatory domain (a CAR costimulatory domain). In some embodiments, the CAR costimulatory domain is derived from the intracellular domain of a costimulatory receptor, for example, a costimulatory receptor selected from the group consisting of CD30, CD27, CD28, 4-1BB (CD137), OX40, CD40, PD-1, ICOS, lymphocyte function-associated antigen-1 (LFA-1), CD2, CD7, LIGHT, NKG2C, B7-H₃, a ligand that specifically binds with CD83, and Dap10. Exemplary sequences of CARs described herein can be found in the Informal Sequence Listing table, e.g., SEQ ID NOS:1-12. In some embodiments, the CARs with myc-tags are used in in vitro and pre-clinical assays. For in vivo use, i.e., in vivo use in humans, the corresponding CAR constructs without myc-tags are used.

[0136] In some embodiments, a spacer domain may be present between the extracellular target-binding domain and the transmembrane domain of the CAR. In some embodiments, a spacer domain may be present between the transmembrane domain and the costimulatory domain of the CAR, if present. In some embodiments, a spacer domain may be present between the costimulatory domain (if present) and the primary signaling domain of the CAR. In some embodiments, a spacer domain may be present between the transmembrane domain and the primary signaling domain of the CAR. The spacer domain can be any oligo- or polypeptide that functions to link two parts of the CAR. A spacer domain may comprise up to about 300 amino acids, including for example about 10 to about 100, or about 25 to about 50 amino acids.

[0137] II. Chimeric Stimulating Receptors (CSRs)

[0138] The disclosure provides a chimeric stimulating receptor (CSR), also called chimeric signaling receptor by us, comprising: (i) a ligand-binding module that is capable of binding or interacting with a target ligand; (ii) a transmembrane domain (a CSR transmembrane domain); and (iii) a CD30 costimulatory domain, wherein the CSR lacks a functional primary signaling domain. The CSRs described herein specifically binds to a target ligand (such as a cell surface antigen or a peptide/MHC complex) and is capable of stimulating an immune cell on the surface of which it is functionally expressed upon target ligand binding. The CSR comprises a ligand-binding module that provides the ligand-binding specificity, a transmembrane module, and a CD30 costimulatory immune cell signaling module that allows for stimulating the immune cell. The CSR lacks a functional primary immune cell signaling sequence. In some embodiments, the CSR lacks any primary immune cell signaling sequence. In some embodiments, the CSR comprises a single polypeptide chain comprising the ligand-binding module, transmembrane module, and CD30 costimulatory signaling module. In some embodiments, the CSR comprises a first polypeptide chain and a second polypeptide chain, wherein the first and second polypeptide chains together form the ligand-binding module, transmembrane module, and CD30 costimulatory signaling module. In some embodiments, the first and second polypeptide chains are separate polypeptide chains, and the CSR is a multimer, such as a dimer. In some embodiments, the first and second polypeptide chains are covalently linked, such as by a peptide linkage, or by another chemical linkage, such as a disulfide linkage. In some embodiments, the first polypeptide chain and the second polypeptide chain are linked by at least one disulfide bond. In some embodiments, the expression of the CSR in the CAR plus CSR immune cell is inducible. In some embodiments, the expression of the CSR in the CAR plus CSR immune cell is inducible upon signaling through the CAR. Exemplary sequences of CSRs described herein can be found in the Informal Sequence Listing table, e.g., SEQ ID NOS:13-42. In some embodiments, the CSRs with myc-tags are used in in vitro and pre-clinical assays. For in vivo use, i.e., in vivo use in humans, the corresponding CSR constructs without myc-tags are used.

[0139] The CD30 costimulatory domain of the CSR can comprise a sequence that can bind to an intracellular TRAF signaling protein. In some embodiments, the sequence that can bind to an intracellular TRAF signaling protein corresponds to residues 561-573 or 578-586 of a full-length CD30 having the sequence of SEQ ID NO:65. In certain embodiments, the CD30 costimulatory domain comprises a sequence that is at least 80%, 85%, 90%, 95%, or 100% (e.g., 80%, 81%, 82%, 83%, 84%, 85%, 86%, 87%, 88%, 89%, 90%, 91%, 92%, 93%, 94%, 95%, 96%, 97%, 98%, 99%, or 100%) identical to residues 561-573 or 578-586 of SEQ ID NO:65. In certain embodiments, the CD30 costimulatory domain comprises a sequence that is at least 70%, 75%, 80%, 85%, 90%, 95%, or 100% (e.g., 70%, 71%, 72%, 73%, 74%, 75%, 76%, 77%, 78%, 79%, 80%, 81%, 82%, 83%, 84%, 85%, 86%, 87%, 88%, 89%, 90%, 91%, 92%, 93%, 94%, 95%, 96%, 97%, 98%, 99%, or 100%) identical to the sequence of SEQ ID NO:75. As described herein, immune T cells with a CAR and a CSR that comprises a costimulatory domain from CD30 express far less PD-1, an inhibitor of T cell activation, than T cells with the same CAR and a corresponding CSR that does not have a CD30 costimulatory domain, e.g., a costimulatory domain from, e.g., CD28, 4-1BB, or Dap10. T cells with a CSR containing a costimulatory domain from CD30 also demonstrate persistence in cytotoxic potential. The costimulatory domain from CD30 may ameliorate the functional unresponsiveness that leads to T cell exhaustion, i.e., anergy. The ability of a CD30 costimulatory domain to provide T cells with superior persistence of tumor cell killing is unexpected since CD30 lacks a p56lck-binding site that is thought to be crucial for costimulation.

[0140] The CSR can comprise more than one CD30 costimulatory domain. In addition to the CD30 costimulatory domain, in some embodiments, the CSR further comprises at least one costimulatory domain which comprises the intracellular sequence of a costimulatory molecule that is different from CD30. In particular embodiments, the costimulatory molecule that is different from CD30 is selected from the group consisting of CD27, CD28, 4-1BB (CD137), OX40, CD40, PD-1, ICOS, lymphocyte function-associated antigen-1 (LFA-1), CD2, CD7, LIGHT, NKG2C, B7-H3, a ligand that specifically binds with CD83, and Dap10.

[0141] In some embodiments, a spacer domain may be present between the ligand-binding module and the transmembrane domain of the CSR. In some embodiments, a spacer domain may be present between the transmembrane domain and the CD30 costimulatory domain of the CSR. The spacer domain can be any oligo- or polypeptide that functions to link two parts of the CAR. A spacer domain may comprise up to about 300 amino acids, including for example about 10 to about 100, or about 25 to about 50 amino acids.

[0142] Target Antigen

[0143] In some embodiments, the extracellular target-binding domain of the CAR and the ligand-binding module of the CSR can target the same target antigen. In other embodiments, the extracellular target-binding domain of the CAR and the ligand-binding module of the CSR can target different target antigens. In some embodiments, the ligand-binding module of the CSR is derived from the extracellular domain of a receptor. The ligand-binding module of the CSR can comprise an antibody moiety (a CSR antibody moiety). The CSR antibody moiety and/or the CAR antibody moiety can be a single chain antibody fragment. In some embodiments, the CAR antibody moiety and/or the CSR antibody moiety is a single chain Fv (scFv), a single chain Fab, a single chain Fab′, a single domain antibody fragment, a single domain multispecific antibody, an intrabody, a nanobody, or a single chain immunokine. In certain embodiments, the CAR antibody moiety and/or the CSR antibody moiety is a single domain multispecific antibody, e.g., a single domain bispecific antibody. In certain embodiments, the CAR antibody moiety and/or the CSR antibody moiety is a single chain Fv (scFv), e.g., a tandem scFv. In some embodiments, the CAR antibody moiety and/or the CSR antibody moiety specifically binds to a disease-related antigen. The disease-related antigen can be a cancer-related antigen or a virus-related antigen.

[0144] The CAR antibody moiety and/or the CSR antibody moiety can specifically bind to a cell surface antigen. A cell surface antigen can be selected from the group consisting of protein, carbohydrate, and lipid. In certain embodiments, the cell surface antigen is CD19, CD20, CD22, CD47, CD158e, GPC3, ROR1, ROR2, BCMA, GPRC5D, FcRL5, MUC16, MCT4, PSMA, or a variant or mutant thereof. The CAR antibody moiety and/or the CSR antibody moiety can specifically bind to an MHC-restricted antigen. The MHC-restricted antigen can be a complex comprising a peptide and an MHC protein, and the peptide can be derived from a protein selected from the group consisting of WT-1, AFP, HPV16-E7, NY-ESO-1, PRAME, EBV-LMP2A, HIV-1, KRAS, FoxP3, Histone H3.3, PSA, and a variant or mutant thereof.

[0145] In some embodiments, the CAR antibody moiety binds to CD19, and wherein the ligand-binding module of the CSR binds to CD19. In some embodiments, the CAR antibody moiety binds to CD22, and the ligand-binding module of the CSR binds to CD22. In some embodiments, the CAR antibody moiety binds to CD20, and the ligand-binding module of the CSR binds to CD20. In some embodiments, the CAR antibody moiety binds to CD19, and the ligand-binding module of the CSR binds to CD22. In some embodiments, the CAR antibody moiety binds to CD19, and the ligand-binding module of the CSR binds to CD20. In some embodiments, the CAR antibody moiety binds to CD22, and the ligand-binding module of the CSR binds to CD20. In some embodiments, the CAR antibody moiety binds to CD22, and the ligand-binding module of the CSR binds to CD19. In some embodiments, the CAR antibody moiety binds to CD20, and the ligand-binding module of the CSR binds to CD19. In some embodiments, the CAR antibody moiety binds to CD20, and the ligand-binding module of the CSR binds to CD22. In some embodiments, the CAR antibody moiety and/or the ligand-binding module of the CSR binds to both CD19 and CD22. In some embodiments, the CAR antibody moiety and/or the ligand-binding module of the CSR binds to both CD19 and CD20. In some embodiments, the CAR antibody moiety and/or the ligand-binding module of the CSR binds to both CD20 and CD22. In some embodiments, the CAR antibody moiety and/or the ligand-binding module of the CSR binds to CD19, CD20, and CD22.

[0146] In some embodiments, the CAR antibody moiety specifically binds to a complex comprising an alpha-fetoprotein (AFP) peptide and an MHC class I protein. In some embodiments, the ligand-binding module of the CSR specifically binds to glypican 3 (GPC3). In some embodiments, the CAR antibody moiety binds to a complex comprising an AFP peptide and an MHC class I protein, and the ligand-binding module of the CSR binds to GPC3.

[0147] In some embodiments, according to any of the CARs or CSRs described herein comprising an antibody moiety that specifically binds to a target antigen, the antibody moiety comprises the CDRs or variable domains (V_{H} and/or V_{L} domains) of an antibody moiety specific for the target antigen. In some embodiments, the antibody moiety comprises the CDRs or variable domains (V_{H} and/or V_{L} domains) of an antibody moiety specific for CD19 (see, e.g., WO2017/066136A2). In some embodiments, the antibody moiety comprises the CDRs or variable domains (V_{H} and/or V_{L} domains) of an antibody moiety specific for CD19 (e.g., V_{H} domain comprising, consisting essentially of, or consisting of the amino acid sequence of SEQ ID NO:102 and/or V_{L} domain comprising, consisting essentially of, or consisting of the amino acid sequence of SEQ ID NO:103, or CDRs contained therein). In some embodiments, the antibody moiety comprises the CDRs or variable domains (V_{H} and/or V_{L} domains) of an antibody moiety specific for CD20 (e.g., V_{H} domain comprising, consisting essentially of, or consisting of the amino acid sequence of SEQ ID NO:104 and/or V_{L} domain comprising, consisting essentially of, or consisting of the amino acid sequence of SEQ ID NO:105, or CDRs contained therein). In some embodiments, the antibody moiety comprises the CDRs or variable domains (V_{H} and/or V_{L} domains) of an antibody moiety specific for CD22 (see, e.g., U.S. Ser. No. 62/650,955 filed Mar. 30, 2018 and PCT/US2019/025032, filed Mar. 29, 2019), the contents of which are incorporated herein by reference in their entirety). In some embodiments, the antibody moiety comprises the CDRs or variable domains (V_{H} and/or V_{L} domains) of an antibody moiety specific for CD22 (e.g., V_{H} domain comprising, consisting essentially of, or consisting of the amino acid sequence of SEQ ID NO:98 and/or V_{L} domain comprising, consisting essentially of, or consisting of the amino acid sequence of SEQ ID NO:99, or CDRs contained therein). In some embodiments, the antibody moiety comprises the CDRs or variable domains (V_{H} and/or V_{L} domains) of an antibody moiety specific for CD22 (e.g., V_{H} domain comprising, consisting essentially of, or consisting of the amino acid sequence of SEQ ID NO:100 and/or V_{L} domain comprising, consisting essentially of, or consisting of the amino acid sequence of SEQ ID NO:101, or CDRs contained therein). In some embodiments, the antibody moiety comprises the CDRs or variable domains (V_{H} and/or V_{L} domains) of an antibody moiety specific for CD47 (see, e.g., WO2018/200585A1). In some embodiments, the antibody moiety comprises the CDRs or variable domains (V_{H} and/or V_{L} domains) of an antibody moiety specific for CD47 (e.g., V_{H} domain comprising, consisting essentially of, or consisting of the amino acid sequence of SEQ ID NO:106 and/or V_{L} domain comprising, consisting essentially of, or consisting of the amino acid sequence of SEQ ID NO:107, or CDRs contained therein).

[0148] In some embodiments, the antibody moiety comprises the CDRs or variable domains (V_{H} and/or V_{L} domains) of an antibody moiety specific for GPC3 (see, e.g., WO2018/200586A1, the contents of which are incorporated herein by reference in their entirety). In some embodiments, the antibody moiety comprises the CDRs or variable domains (V_{H} and/or V_{L} domains) of an antibody moiety specific for GPC3 (e.g., V_{H} domain comprising, consisting essentially of, or consisting of the amino acid sequence of SEQ ID NO:108 and/or V_{L} domain comprising, consisting essentially of, or consisting of the amino acid sequence of SEQ ID NO:109, or CDRs contained therein). In some embodiments, the antibody moiety comprises the CDRs or variable domains (V_{H} and/or V_{L} domains) of an antibody moiety specific for GPC3 (e.g., V_{H} domain comprising, consisting essentially of, or consisting of the amino acid sequence of SEQ ID NO:110 and/or V_{L} domain comprising, consisting essentially of, or consisting of the amino acid sequence of SEQ ID NO:111, or CDRs contained therein). In some embodiments, the antibody moiety comprises the CDRs or variable domains (V_{H} and/or V_{L} domains) of an antibody moiety specific for ROR1 (see, e.g., WO2016/187220 and WO2016/187216). In some embodiments, the antibody moiety comprises the CDRs or variable domains (V_{H} and/or V_{L} domains) of an antibody moiety specific for ROR2 (see, e.g., WO2016/142768). In some embodiments, the antibody moiety comprises the CDRs or variable domains (V_{H} and/or V_{L} domains) of an antibody moiety specific for BCMA (see, e.g., WO2016/090327 and WO2016/090320). In some embodiments, the antibody moiety comprises the CDRs or variable domains (V_{H} and/or V_{L} domains) of an antibody moiety specific for GPRC5D (see, e.g., WO2016/090329 and WO2016/090312). In some embodiments, the antibody moiety comprises the CDRs or variable domains (V_{H} and/or V_{L} domains) of an antibody moiety specific for FCRL5 (see, e.g., WO2016/090337). In some embodiments, the antibody moiety comprises the CDRs or variable domains (V_{H} and/or V_{L} domains) of an antibody moiety specific for MUC16 (see, e.g., U.S. Ser. No. 62/845,065, filed May 8, 2019 and U.S. Ser. No. 62/768,730, filed Nov. 16, 2018 the contents of which are incorporated herein by reference in their entirety). In some embodiments, the antibody moiety comprises the CDRs or variable domains (V_{H} and/or V_{L} domains) of an antibody moiety specific for MCT4 (see, e.g., PCT/US2019/023402, filed Mar. 21, 2019, the contents of which are incorporated herein by reference in their entirety). In some embodiments, the antibody moiety comprises the CDRs or variable domains (V_{H} and/or V_{L} domains) of an antibody moiety specific for PSMA (see, e.g., PCT/US2019/037534, filed Jun. 17, 2019, the contents of which are incorporated herein by reference in their entirety). In some embodiments, the antibody moiety comprises the CDRs or variable domains (V_{H} and/or V_{L} domains) of an antibody moiety specific for a WT-1 peptide/MHC complex (see, e.g., WO2012/135854, WO2015/070078, and WO2015/070061). In some embodiments, the antibody moiety comprises the CDRs or variable domains (V_{H} and/or V_{L} domains) of an antibody moiety specific for an AFP peptide/MHC complex (see, e.g., WO2016/161390). In some embodiments, the antibody moiety comprises the CDRs or variable domains (V_{H} and/or V_{L} domains) of an antibody moiety specific for a HPV16-E7 peptide/MHC complex (see, e.g., WO2016/182957). In some embodiments, the antibody moiety comprises the CDRs or variable domains (V_{H} and/or V_{L} domains) of an antibody moiety specific for a NY-ESO-1 peptide/MHC complex (see, e.g., WO2016/210365). In some embodiments, the antibody moiety comprises the CDRs or variable domains (V_{H} and/or V_{L} domains) of an antibody moiety specific for a PRAME peptide/MHC complex (see, e.g., WO2016/191246). In some embodiments, the antibody moiety comprises the CDRs or variable domains (V_{H} and/or V_{L} domains) of an antibody moiety specific for a EBV-LMP2A peptide/MHC complex (see, e.g., WO2016/201124). In some embodiments, the antibody moiety comprises the CDRs or variable domains (V_{H} and/or V_{L} domains) of an antibody moiety specific for a KRAS peptide/MHC complex (see, e.g., WO2016/154047). In some embodiments, the antibody moiety comprises the CDRs or variable domains (V_{H} and/or V_{L} domains) of an antibody moiety specific for a PSA peptide/MHC complex (see, e.g., WO2017/015634). In some embodiments, the antibody moiety comprises the CDRs or variable domains (V_{H} and/or V_{L} domains) of an antibody moiety specific for a FoxP3 peptide/MHC complex (see, e.g., PCT/US2019/018112 filed Feb. 14, 2018, the contents of which are incorporated herein by reference in their entirety). In some embodiments, the antibody moiety comprises the CDRs or variable domains (V_{H} and/or V_{L} domains) of an antibody moiety specific for a Histone H3.3 peptide/MHC complex (see, e.g., WO2018/132597). In some embodiments, the antibody moiety comprises the CDRs or variable domains (V_{H} and/or V_{L} domains) of an antibody moiety specific for a HIV-1 peptide/MHC complex (see, e.g., WO2018057967). In some embodiments, the antibody moiety is a scFv (single chain variable fragment) comprising a V_{H} domain and a V_{L} domain. In some embodiments, the scFv comprises an antigen-binding module that specifically binds to a complex comprising a peptide and an MHC protein, known as a peptide/MHC complex.

[0149] Table A lists exemplary proteins whose fragments or peptides can be targeted by the CAR and CSR. Also listed are possible diseases, specifically possible cancers (e.g., solid tumor cancers) that such T cells can treat.

TABLE A

| CAR Target (Peptide-MHC | | |
|---|---|---|
| Complex, including mutant | CSR Target | Exemplary |
| peptide, other than GPC3, | (All Cell Surface | Cancers to be |
| PSMA, and ROR1) | Protein) | Treated |
| AFP, GPC3 | GPC3 | Liver Cancer |
| KRAS | MSLN, ROR1 | Pancreatic Cancer |
| PSA, PSMA, ROR1 | PSMA, ROR1 | Prostate Cancer |
| NY-ESO-1, PRAME | ROR2 | Melanoma |
| KRAS, PRAME | ROR2 | Gastrointestinal |
| | | Cancers |
| PRAME, PSA, ROR1 | HER2, EpCAM, | Breast Cancers |
| | ROR1 | (including |
| | | Metastatic Breast |
| | | Cancer) |
| WT1, NY-ESO-1, ROR1 | MUC1, MUC16, | Ovarian Cancer |
| | FRα, ROR1. | |
| KRAS | EGFR | Colorectal Cancers |
| | | (including |
| | | Metastatic |
| | | Colorectal Cancer) |
| Histone H3.3 | EGFR, EGFRvIII | Glioblastoma |
| KRAS, NY-ESO-1, ROR1 | HER3, DLL3, | Lung Cancer |
| | c-Met, ROR1 | |
| PRAME | ROR2, CD70 | Renal Cell |
| | | Carcinoma |

[0150] Extracellular Target-Binding Domain/Ligand-Binding Module

[0151] An extracellular target-binding domain of a CAR and/or a ligand-binding module of a CSR described herein may comprise an antibody moiety or an antigen-binding fragment thereof. In certain embodiments, the extracellular target-binding domain can be a single-chain variable fragment derived from an antibody (scFv), a tandem scFv, a single-domain antibody fragment (VHHs or sdAbs), a single domain bispecific antibody (BsAbs), an intrabody, a nanobody, an immunokine in a single chain format, and Fab, Fab′, or (Fab′)₂ in a single chain format. In other embodiments, the extracellular target-binding domain can be an antibody moiety that comprises covalently bound multiple chains of variable fragments. The extracellular target-binding domain can be joined to the TM domain via a flexible hinge/spacer region.

[0152] scFv and Tandem scFv

[0153] An extracellular target-binding domain of a CAR and/or a ligand-binding module of a CSR described herein may comprise an antibody moiety that is a single chain Fv (scFv) antibody. An scFv antibody may comprise a light chain variable region and a heavy chain variable region, in which the light chain variable region and the heavy chain variable region may be joined using recombinant methods by a synthetic linker to make a single polypeptide chain. In some embodiments, the scFv may have the structure “(N-terminus) light chain variable region-linker-heavy chain variable region (C-terminus),” in which the heavy chain variable region is joined to the C-terminus of the light chain variable region by way of a linker. In other embodiments, the scFv may have the structure “(N-terminus) heavy chain variable region-linker-light chain variable region (C-terminus),” in which the light chain variable region is joined to the C-terminus of the heavy chain variable region by way of a linker. A linker may be a polypeptide including 2 to 200 (e.g., 2, 3, 5, 10, 15, 20, 25, 30, 35, 40, 45, 50, 55, 60, 65, 70, 75, 80, 85, 90, 95, 100, 110, 120, 130, 140, 150, 160, 170, 180, 190, or 200) amino acids. Suitable linkers may contain flexible amino acid residues such as glycine and serine.

[0154] An extracellular target-binding domain of a CAR and/or a ligand-binding module of a CSR may comprise an antibody moiety that is a tandem scFv comprising a first scFv and a second scFv (also referred to herein as a “tandem scFv multispecific antibody”). In some embodiments, the tandem scFv multispecific antibody further comprises at least one (such as at least about any of 2, 3, 4, 5, or more) additional scFv.

[0155] In some embodiments, there is provided a tandem scFv multispecific (e.g., bispecific) antibody comprising a) a first scFv that specifically binds to an extracellular region of a target ligand, and b) a second scFv. In some embodiments, the target ligand is CD22 and the first scFv specifically binds to an extracellular region of CD22. In some embodiments, the target ligand is CD19 and the first scFv specifically binds to an extracellular region of CD19. In some embodiments, the target ligand is an alpha-fetoprotein (AFP) peptide and the first scFv specifically binds to an extracellular region of the AFP peptide.

[0156] In some embodiments, the second scFv specifically binds to another antigen. In some embodiments, the second scFv specifically binds to an antigen on the surface of a cancer cell. In some embodiments, the second scFv specifically binds to an antigen on the surface of a cell that does not express CD22. In some embodiments, the second scFv specifically binds to an antigen on the surface of a cell that does not express CD19. In some embodiments, the second scFv specifically binds to an antigen on the surface of a cell that does not express AFP peptide. In some embodiments, the second scFv specifically binds to an antigen on the surface of a cytotoxic cell. In some embodiments, the second scFv specifically binds to an antigen on the surface of a lymphocyte, such as a T cell, an NK cell, a neutrophil, a monocyte, a macrophage, or a dendritic cell. In some embodiments, the second scFv specifically binds to an antigen on the surface of an effector T cell, such as a cytotoxic T cell. In some embodiments, the second scFv specifically binds to an antigen on the surface of an effector cell, including for example CD3γ, CD3δ, CD3δ, CD3ζ, CD28, CD16a, CD56, CD68, GDS2D, OX40, GITR, CD137, CD27, CD40L and HVEM.

[0157] In some embodiments, the first scFv is human, humanized, or semi-synthetic. In some embodiments, the second scFv is human, humanized, or semi-synthetic. In some embodiments, both the first scFv and the second scFv are human, humanized, or semi-synthetic. In some embodiments, the tandem scFv multispecific antibody further comprises at least one (such as at least about any of 2, 3, 4, 5, or more) additional scFv.

[0158] In some embodiments, there is provided a tandem scFv multispecific (e.g., bispecific) antibody comprising a) a first scFv that specifically binds to an extracellular region of a target antigen, and b) a second scFv, wherein the tandem scFv multispecific antibody is a tandem di-scFv or a tandem tri-scFv. In some embodiments, the tandem scFv multispecific antibody is a tandem di-scFv. In some embodiments, the tandem scFv multispecific antibody is a bispecific T-cell engager.

[0159] In some embodiments, the tandem di-scFv bispecific antibody binds to an extracellular region of a target antigen or a portion thereof with a Kd between about 0.1 pM to about 500 nM (such as about any of 0.1 pM, 1.0 pM, 10 pM, 50 pM, 100 pM, 500 pM, 1 nM, 10 nM, 50 nM, 100 nM, or 500 nM, including any ranges between these values). In some embodiments, the tandem di-scFv bispecific antibody binds to an extracellular region of a target antigen or a portion thereof with a Kd between about 1 nM to about 500 nM (such as about any of 1, 10, 25, 50, 75, 100, 150, 200, 250, 300, 350, 400, 450, or 500 nM, including any ranges between these values).

[0160] A variety of technologies are known in the art for designing, constructing, and/or producing multispecific antibodies. Multispecific antibodies may be constructed that either utilize the full immunoglobulin framework (e.g., IgG), single chain variable fragment (scFv), or combinations thereof. Bispecific antibodies may be composed of two scFv units in tandem as described above. In the case of anti-tumor immunotherapy, bispecific antibodies that comprise two single chain variable fragments (scFvs) in tandem may be designed such that an scFv that binds a tumor antigen is linked with an scFv that engages T cells, i.e., by binding CD3 on the T cells. Thus, T cells are recruited to a tumor site to mediate killing of the tumor cells. Bispecific antibodies can be made, for example, by combining heavy chains and/or light chains that recognize different epitopes of the same or different antigen. In some embodiments, by molecular function, a bispecific binding agent binds one antigen (or epitope) on one of its two binding arms (one V_{H}/V_{L} pair), and binds a different antigen (or epitope) on its second arm (a different V_{H}/V_{L} pair). By this definition, a bispecific binding agent has two distinct antigen binding arms (in both specificity and CDR sequences), and is monovalent for each antigen to which it binds. In certain embodiments, a bispecific binding agent according to the present invention comprises a first and a second scFv. In some certain embodiments, a first scFv is linked to the C-terminal end of a second scFv. In some certain embodiments, a second scFv is linked to the C-terminal end of a first scFv. In some certain embodiments, scFvs are linked to each other via a linker (e.g., SRGGGGSGGGGSGGGGSLEMA (SEQ ID NO:78)). In some certain embodiments, scFvs are linked to each other without a linker.

[0161] A linker may be a polypeptide including 2 to 200 (e.g., 2, 3, 5, 10, 15, 20, 25, 30, 35, 40, 45, 50, 55, 60, 65, 70, 75, 80, 85, 90, 95, 100, 110, 120, 130, 140, 150, 160, 170, 180, 190, or 200) amino acids. Suitable linkers may contain flexible amino acid residues such as glycine and serine. In certain embodiments, a linker may contain motifs, e.g., multiple or repeating motifs, of GS, GGS, GGGGS (SEQ ID NO:79), GGSG (SEQ ID NO:80), or SGGG (SEQ ID NO:81). In some embodiments, a linker may have the sequence GSGS (SEQ ID NO:82), GSGSGS (SEQ ID NO:83), GSGSGSGS (SEQ ID NO:84), GSGSGSGSGS (SEQ ID NO:85), GGSGGS (SEQ ID NO:86), GGSGGSGGS (SEQ ID NO:87), GGSGGSGGSGGS (SEQ ID NO:88). GGSG (SEQ ID NO:89), GGSGGGSG (SEQ ID NO:90), or GGSGGGSGGGSG (SEQ ID NO:91). In other embodiments, a linker may also contain amino acids other than glycine and serine, e.g., SRGGGGSGGGGSGGGGSLEMA (SEQ ID NO:78).

[0162] Transmembrane Domain (TM)

[0163] The transmembrane domain of the CAR and/or the CSR may be derived either from a natural or from a synthetic source. Where the source is natural, the domain may be derived from any membrane-bound or transmembrane protein. Transmembrane regions of particular use in this invention may be derived from (i.e., comprise at least the transmembrane region(s) of) the α, β, δ, γ, or ζ chain of the T-cell receptor, CD28, CD3ε, CD3ζ, CD45, CD4, CD5, CD8, CD9, CD16, CD22, CD30, CD33, CD37, CD64, CD80, CD86, CD134, CD137, or CD154. In some embodiments, a transmembrane domain can be chosen based on, for example, the nature of the various other proteins or trans-elements that bind the transmembrane domain or the cytokines induced by the transmembrane domain. For example, the transmembrane domain derived from CD30 lacks a binding site for the p56lck kinase, a common motif in the TNF receptor family. In some embodiments, a transmembrane region of particular use in this invention may be derived from (i.e., comprise at least the transmembrane region(s) of) CD8, e.g., a transmembrane region comprising a sequence having at least 80% (e.g., 80%, 81%, 82%, 83%, 84%, 85%, 86%, 87%, 88%, 89%, 90%, 91%, 92%, 93%, 94%, 95%, 96%, 97%, 98%, 99%, or 100%) sequence identity to the sequence of SEQ ID NO:66. In some embodiments, a transmembrane region of particular use in this invention may be derived from (i.e., comprise at least the transmembrane region(s) of) CD30, e.g., a transmembrane region comprising a sequence having at least 80% (e.g., 80%, 81%, 82%, 83%, 84%, 85%, 86%, 87%, 88%, 89%, 90%, 91%, 92%, 93%, 94%, 95%, 96%, 97%, 98%, 99%, or 100%) sequence identity to the sequence of SEQ ID NO:70.

[0164] In certain embodiments, the transmembrane domain may be chosen based on the target antigen. For example, a CAR containing an antibody moiety specific for an AFP peptide/MHC complex and a transmembrane domain derived from CD8 appeared to have better in vitro killing properties than a corresponding CAR containing a transmembrane domain derived from CD30. This result was not observed in a CAR containing an antibody moiety specific for CD19.

[0165] In some embodiments, the transmembrane domain may be synthetic, in which case it may comprise predominantly hydrophobic residues such as leucine and valine. In some embodiments, a triplet of phenylalanine, tryptophan, and valine may be found at each end of a synthetic transmembrane domain. In some embodiments, a short oligo- or polypeptide linker, having a length of, for example, between about 2 and about 10 (such as about any of 2, 3, 4, 5, 6, 7, 8, 9, or 10) amino acids in length may form the linkage between the transmembrane domain and the intracellular signaling domain of a CAR or CSR described herein. In some embodiments, the linker is a glycine-serine doublet. In some embodiments, the linker between the CAR's extracellular target binding domain and/or the CSR's ligand-binding module and the transmembrane domain comprises a partial extracellular domain (ECD) of a molecule such as the same as or a different molecule from the transmembrane domain's original molecule. For example, the linker connecting a transmembrane domain derived from or comprising CD8 or CD30 can comprise an ECD of CD8 or CD30, respectively or alternatively.

[0166] In some embodiments, the transmembrane domain that naturally is associated with one of the sequences in the intracellular signaling domain of the CAR or CSR is used. In some embodiments, the transmembrane domain can be selected or modified by amino acid substitution to avoid binding of such domains to the transmembrane domains of the same or different surface membrane proteins to minimize interactions with other members of the receptor complex.

[0167] Intracellular Signaling Domain

[0168] The intracellular signaling domain of the CAR and/or CSR is responsible for activation of at least one of the normal effector functions of the immune cell in which the CAR and CSR have been placed in. Effector function of a T cell, for example, may be cytolytic activity or helper activity including the secretion of cytokines. Thus, the term “intracellular signaling domain” refers to the portion of a protein which transduces the effector function signal and directs the cell to perform a specialized function. While usually the entire intracellular signaling domain can be employed, in many cases it is not necessary to use the entire chain. To the extent that a truncated portion of the intracellular signaling domain is used, such a truncated portion may be used in place of the intact chain as long as it transduces the effector function signal. The term “intracellular signaling sequence” is thus meant to include any truncated portion of the intracellular signaling domain sufficient to transduce the effector function signal.

[0169] Examples of intracellular signaling domains for use include the cytoplasmic sequences of the T cell receptor (TCR) and co-receptors that act in concert to initiate signal transduction following antigen receptor engagement, as well as any derivative or variant of these sequences and any synthetic sequence that has the same functional capability.

[0170] It is known that signals generated through the TCR alone are insufficient for full activation of the T cell and that a secondary or costimulatory signal is also required. Thus, T cell activation can be said to be mediated by two distinct classes of intracellular signaling sequence: those that initiate antigen-dependent primary activation through the TCR (primary signaling sequences) and those that act in an antigen-independent manner to provide a secondary or costimulatory signal (costimulatory signaling sequences).

[0171] Primary signaling sequences regulate primary activation of the TCR complex either in a stimulatory way, or in an inhibitory way. Primary signaling sequences that act in a stimulatory manner may contain signaling motifs which are known as immunoreceptor tyrosine-based activation motifs or ITAMs. In some embodiments, the CARs described herein comprise one or more ITAMs.

[0172] Examples of ITAM containing primary signaling sequences that are of particular use in the invention include those derived from TCRζ, FcRγ, FcRβ, CD3γ, CD3δ, CD3ε, CD3C, CD5, CD22, CD79a, CD79b, and CD66d. In some embodiments, an ITAM containing primary signaling sequence is derived from CD3C.

[0173] In some embodiments, the CAR comprises a primary signaling sequence derived from CD3ζ. For example, the intracellular signaling domain of the CAR can comprise the CD3ζ intracellular signaling sequence by itself or combined with any other desired intracellular signaling sequence(s) useful in the context of the CAR of the invention. For example, the intracellular signaling domain of the CAR can comprise a CD3ζ primary intracellular signaling sequence and a costimulatory signaling sequence.

[0174] In some embodiments, the intracellular signaling domain is capable of activating an immune cell. In some embodiments, the intracellular signaling domain comprises a primary signaling sequence and a costimulatory signaling sequence. In some embodiments, the primary signaling sequence comprises a CD3ζ intracellular signaling sequence. In some embodiments, the costimulatory signaling sequence comprises a CD30 intracellular signaling sequence.

[0175] III. Multispecific Antibodies

[0176] An extracellular target-binding domain of a CAR and/or a ligand-binding module of a CSR may comprise an antibody moiety that is a multispecific antibody. A multispecific antibody may comprise a first binding moiety and a second binding moiety (such as a second antigen-binding moiety). Multispecific antibodies are antibodies that have binding specificities for at least two different antigens or epitopes (e.g., bispecific antibodies have binding specificities for two antigens or epitopes). Multispecific antibodies with more than two specificities are also contemplated. For example, trispecific antibodies can be prepared (see, e.g., Tutt et al., J. Immunol. 147: 60 (1991)). It is to be appreciated that one of skill in the art could select appropriate features of individual multispecific antibodies described herein to combine with one another to form a multispecific antibodies of the invention.

[0177] Thus, for example, in some embodiments, there is provided a multispecific (e.g., bispecific) antibody comprising a) a first binding moiety that specifically binds to an extracellular region of a first target antigen, and b) a second binding moiety (such as an antigen-binding moiety). In some embodiments, the second binding moiety specifically binds to a different target antigen. In some embodiments, the second binding moiety specifically binds to an antigen on the surface of a cell, such as a cytotoxic cell. In some embodiments, the second binding moiety specifically binds to an antigen on the surface of a lymphocyte, such as a T cell, an NK cell, a neutrophil, a monocyte, a macrophage, or a dendritic cell. In some embodiments, the second binding moiety specifically binds to an effector T cell, such as a cytotoxic T cell (also known as cytotoxic T lymphocyte (CTL) or T killer cell).

[0178] In some embodiments, the second binding moiety specifically binds to a tumor antigen. Examples of tumor antigens include, but are not limited to, alpha fetoprotein (AFP), CA15-3, CA27-29, CA19-9, CA-125, calretinin, carcinoembryonic antigen, CD34, CD99, CD117, chromogranin, cytokeratin, desmin, epithelial membrane protein (EMA), Factor VIII, CD31 FL1, glial fibrillary acidic protein (GFAP), gross cystic disease fluid protein (GCDFP-15), HMB-45, human chorionic gonadotropin (hCG), inhibin, keratin, CD45, a lymphocyte marker, MART-1 (Melan-A), Myo D1, muscle-specific actin (MSA), neurofilament, neuron-specific enolase (NSE), placental alkaline phosphatase (PLAP), prostate-specific antigen, S100 protein, smooth muscle actin (SMA), synaptophysin, thyroglobulin, thyroid transcription factor-1, tumor M2-PK, and vimentin.

[0179] In some embodiments, the second antigen-binding moiety in a bispecific antibody binds to CD3. In some embodiments, the second antigen-binding moiety specifically binds to CD3g. In some embodiments, the second antigen-binding moiety specifically binds to an agonistic epitope of CD3g. The term “agonistic epitope”, as used herein, means (a) an epitope that, upon binding of the multispecific antibody, optionally upon binding of several multispecific antibodies on the same cell, allows said multispecific antibodies to activate T cell receptor (TCR) signaling and induce T cell activation, and/or (b) an epitope that is solely composed of amino acid residues of the epsilon chain of CD3 and is accessible for binding by the multispecific antibody, when presented in its natural context on T cells (i.e., surrounded by the TCR, the CD37 chain, etc.), and/or (c) an epitope that, upon binding of the multispecific antibody, does not lead to stabilization of the spatial position of CD3F relative to CD3γ.

[0180] In some embodiments, the second antigen-binding moiety binds specifically to an antigen on the surface of an effector cell, including for example CD3γ, CD3δ, CD3ε, CD3ζ, CD28, CD16a, CD56, CD68, GDS2D, OX40, GITR, CD137, CD27, CD40L and HVEM. In other embodiments, the second antigen-binding moiety binds to a component of the complement system, such as C1q. C1q is a subunit of the C1 enzyme complex that activates the serum complement system. In other embodiments, the second antigen-binding moiety specifically binds to an Fc receptor. In some embodiments, the second antigen-binding moiety specifically binds to an Fcγ receptor (FcγR). The FcγR may be an FcγRIII present on the surface of natural killer (NK) cells or one of FcγRI, FcγRIIA, FcγRIIBI, FcγRIIB2, and FcγRIIIB present on the surface of macrophages, monocytes, neutrophils and/or dendritic cells. In some embodiments, the second antigen-binding moiety is an Fc region or functional fragment thereof. A “functional fragment” as used in this context refers to a fragment of an antibody Fc region that is still capable of binding to an FcR, in particular to an FcγR, with sufficient specificity and affinity to allow an FcγR bearing effector cell, in particular a macrophage, a monocyte, a neutrophil and/or a dendritic cell, to kill the target cell by cytotoxic lysis or phagocytosis. A functional Fc fragment is capable of competitively inhibiting the binding of the original, full-length Fc portion to an FcR such as the activating FcγRI. In some embodiments, a functional Fc fragment retains at least 30%, 40%, 50%, 60%, 70%, 80%, 90% or 95% of its affinity to an activating FcγR. In some embodiments, the Fc region or functional fragment thereof is an enhanced Fc region or functional fragment thereof. The term “enhanced Fc region”, as used herein, refers to an Fc region that is modified to enhance Fc receptor-mediated effector-functions, in particular antibody-dependent cell-mediated cytotoxicity (ADCC), complement-dependent cytotoxicity (CDC), and antibody-mediated phagocytosis. This can be achieved as known in the art, for example by altering the Fc region in a way that leads to an increased affinity for an activating receptor (e.g. FcγRIIIA (CD16A) expressed on natural killer (NK) cells) and/or a decreased binding to an inhibitory receptor (e.g., FcγRIIB1/B2 (CD32B)).

[0181] In some embodiments, the multispecific antibodies allow killing of antigen-presenting target cells and/or can effectively redirect CTLs to lyse target-presenting target cells. In some embodiments, the multispecific (e.g., bispecific) antibodies of the present invention show an in vitro EC50 ranging from 10 to 500 ng/ml, and is able to induce redirected lysis of about 50% of the target cells through CTLs at a ratio of CTLs to target cells of from about 1:1 to about 50:1 (such as from about 1:1 to about 15:1, or from about 2:1 to about 10:1).

[0182] In some embodiments, the multispecific (e.g., bispecific) antibody is capable of cross-linking a stimulated or unstimulated CTL and the target cell in such a way that the target cell is lysed. This offers the advantage that no generation of target-specific T cell clones or common antigen presentation by dendritic cells is required for the multispecific antibody to exert its desired activity. In some embodiments, the multispecific antibody of the present invention is capable of redirecting CTLs to lyse the target cells in the absence of other activating signals. In some embodiments, the second antigen-binding moiety specifically binds to CD3 (e.g., specifically binds to CD3ε), and signaling through CD28 and/or IL-2 is not required for redirecting CTLs to lyse the target cells.

[0183] Methods for measuring the preference of the multispecific antibody to simultaneously bind to two antigens (e.g., antigens on two different cells) are within the normal capabilities of a person skilled in the art. For example, when the second binding moiety specifically binds to the second antigen, the multispecific antibody may be contacted with a mixture of first antigen⁺/second antigen⁻ cells and first antigen⁻/second antigen⁺ cells. The number of multispecific antibody-positive single cells and the number of cells cross-linked by multispecific antibodies may then be assessed by microscopy or fluorescence-activated cell sorting (FACS) as known in the art.

[0184] In some embodiments, the multispecific antibody is, for example, a diabody (db), a single-chain diabody (scDb), a tandem scDb (Tandab), a linear dimeric scDb (LD-scDb), a circular dimeric scDb (CD-scDb), a di-diabody, a tandem scFv, a tandem di-scFv (e.g., a bispecific T cell engager), a tandem tri-scFv, a tri(a)body, a bispecific Fab2, a di-miniantibody, a tetrabody, an scFv-Fc-scFv fusion, a dual-affinity retargeting (DART) antibody, a dual variable domain (DVD) antibody, an IgG-scFab, an scFab-ds-scFv, an Fv2-Fc, an IgG-scFv fusion, a dock and lock (DNL) antibody, a knob-into-hole (KiH) antibody (bispecific IgG prepared by the KiH technology), a DuoBody (bispecific IgG prepared by the Duobody technology), a single-domain antibody fragment (VHHs or sdAbs), a single domain bispecific antibody (BsAbs), an intrabody, a nanobody, an immunokine in a single chain format, a heteromultimeric antibody, or a heteroconjugate antibody. In some embodiments, the multispecific antibody is a single chain antibody fragment. In some embodiments, the multispecific antibody is a tandem scFv (e.g., a tandem di-scFv, such as a bispecific T cell engager).

[0185] IV. Antibody-Drug Conjugates

[0186] In some embodiments, there is provided an immunoconjugate comprising an antibody moiety and a therapeutic agent (also referred to herein as an “antibody-drug conjugate”, or “ADC”). In some embodiments, therapeutic agent is a toxin that is either cytotoxic, cytostatic, or otherwise prevents or reduces the ability of the target cells to divide. The use of ADCs for the local delivery of cytotoxic or cytostatic agents, i.e., drugs to kill or inhibit tumor cells in the treatment of cancer (Syrigos and Epenetos, Anticancer Research 19:605-614 (1999); Niculescu-Duvaz and Springer, Adv. Drg. Del. Rev. 26:151-172 (1997); U.S. Pat. No. 4,975,278) allows targeted delivery of the drug moiety to target cells, and intracellular accumulation therein, where systemic administration of these unconjugated therapeutic agents may result in unacceptable levels of toxicity to normal cells as well as the target cells sought to be eliminated (Baldwin et al., Lancet (Mar. 15, 1986):603-605 (1986); Thorpe, (1985) “Antibody Carriers Of Cytotoxic Agents In Cancer Therapy: A Review,” in Monoclonal Antibodies '84: Biological And Clinical Applications, A. Pinchera et al. (eds.), pp. 475-506). Maximal efficacy with minimal toxicity is sought thereby.

[0187] Therapeutic agents used in immunoconjugates (e.g., an ADC) include, for example, daunomycin, doxorubicin, methotrexate, and vindesine (Rowland et al., Cancer Immunol. Immunother. 21:183-187 (1986)). Toxins used in immunoconjugates include bacterial toxins such as diphtheria toxin, plant toxins such as ricin, small molecule toxins such as geldanamycin (Mandler et al., J. Nat. Cancer Inst. 92(19):1573-1581 (2000); Mandler et al., Bioorganic & Med. Chem. Letters 10:1025-1028 (2000); Mandler et al., Bioconjugate Chem. 13:786-791 (2002)), maytansinoids (EP 1391213; Liu et al., Proc. Natl. Acad. Sci. USA 93:8618-8623 (1996)), and calicheamicin (Lode et al., Cancer Res. 58:2928 (1998); Hinman et al., Cancer Res. 53:3336-3342 (1993)). The toxins may exert their cytotoxic and cytostatic effects by mechanisms including tubulin binding, DNA binding, or topoisomerase inhibition. Some cytotoxic drugs tend to be inactive or less active when conjugated to large antibodies or protein receptor ligands.

[0188] Enzymatically active toxins and fragments thereof that can be used include, for example, diphtheria A chain, nonbinding active fragments of diphtheria toxin, exotoxin A chain (from Pseudomonas aeruginosa), ricin A chain, abrin A chain, modeccin A chain, α-sarcin, Aleurites fordii proteins, dianthin proteins, Phytolaca americana proteins (PAPI, PAPII, and PAP-S), Momordica charantia inhibitor, curcin, crotin, Sapaonaria officinalis inhibitor, gelonin, mitogellin, restrictocin, phenomycin, enomycin, and the tricothecenes. See, e.g., WO 93/21232 published Oct. 28, 1993.

[0189] Immunoconjugates (e.g., an ADC) of an antibody moiety and one or more small molecule toxins, such as a calicheamicin, maytansinoids, dolastatins, aurostatins, a trichothecene, and CC1065, and the derivatives of these toxins that have toxin activity, are also contemplated herein.

[0190] In some embodiments, there is provided an immunoconjugate (e.g., an ADC) comprising a therapeutic agent that has an intracellular activity. In some embodiments, the immunoconjugate is internalized and therapeutic agent is a cytotoxin that blocks the protein synthesis of the cell, therein leading to cell death. In some embodiments, therapeutic agent is a cytotoxin comprising a polypeptide having ribosome-inactivating activity including, for example, gelonin, bouganin, saporin, ricin, ricin A chain, bryodin, diphtheria toxin, restrictocin, Pseudomonas exotoxin A and variants thereof. In some embodiments, where therapeutic agent is a cytotoxin comprising a polypeptide having a ribosome-inactivating activity, the immunoconjugate must be internalized upon binding to the target cell in order for the protein to be cytotoxic to the cells.

[0191] In some embodiments, there is provided an immunoconjugate (e.g., an ADC) comprising a therapeutic agent that acts to disrupt DNA. In some embodiments, therapeutic agent that acts to disrupt DNA is, for example, selected from the group consisting of enediyne (e.g., calicheamicin and esperamicin) and non-enediyne small molecule agents (e.g., bleomycin, methidiumpropyl-EDTA-Fe(II)).

[0192] The present invention further contemplates an immunoconjugate (e.g., an ADC) formed between the antibody moiety and a compound with nucleolytic activity (e.g., a ribonuclease or a DNA endonuclease such as a deoxyribonuclease; DNase).

[0193] In some embodiments, the immunoconjugate comprises an agent that acts to disrupt tubulin. Such agents may include, for example, rhizoxin/maytansine, paclitaxel, vincristine and vinblastine, colchicine, auristatin dolastatin 10 MMAE, and peloruside A.

[0194] In some embodiments, the immunoconjugate (e.g., an ADC) comprises an alkylating agent including, for example, Asaley NSC 167780, AZQ NSC 182986, BCNU NSC 409962, Busulfan NSC 750, carboxyphthalatoplatinum NSC 271674, CBDCA NSC 241240, CCNU NSC 79037, CHIP NSC 256927, chlorambucil NSC 3088, chlorozotocin NSC 178248, cis-platinum NSC 119875, clomesone NSC 338947, cyanomorpholinodoxorubicin NSC 357704, cyclodisone NSC 348948, dianhydrogalactitol NSC 132313, fluorodopan NSC 73754, hepsulfam NSC 329680, hycanthone NSC 142982, melphalan NSC 8806, methyl CCNU NSC 95441, mitomycin C NSC 26980, mitozolamide NSC 353451, nitrogen mustard NSC 762, PCNU NSC 95466, piperazine NSC 344007, piperazinedione NSC 135758, pipobroman NSC 25154, porfiromycin NSC 56410, spirohydantoin mustard NSC 172112, teroxirone NSC 296934, tetraplatin NSC 363812, thio-tepa NSC 6396, triethylenemelamine NSC 9706, uracil nitrogen mustard NSC 34462, and Yoshi-864 NSC 102627.

[0195] In some embodiments, the immunoconjugate (e.g., an ADC) comprises a highly radioactive atom. A variety of radioactive isotopes are available for the production of radioconjugated antibodies. Examples include 211At, 131I, 125I, 90Y, 186Re, 188Re, 153Sm, 212Bi, 32P, 212Pb and radioactive isotopes of Lu.

[0196] In some embodiments, the antibody moiety can be conjugated to a “receptor” (such as streptavidin) for utilization in tumor pre-targeting wherein the antibody-receptor conjugate is administered to the patient, followed by removal of unbound conjugate from the circulation using a clearing agent and then administration of a “ligand” (e.g., avidin) that is conjugated to a cytotoxic agent (e.g., a radionucleotide).

[0197] In some embodiments, an immunoconjugate (e.g., an ADC) may comprise an antibody moiety conjugated to a prodrug-activating enzyme. In some such embodiments, a prodrug-activating enzyme converts a prodrug to an active drug, such as an anti-viral drug. Such immunoconjugates are useful, in some embodiments, in antibody-dependent enzyme-mediated prodrug therapy (“ADEPT”). Enzymes that may be conjugated to an antibody include, but are not limited to, alkaline phosphatases, which are useful for converting phosphate-containing prodrugs into free drugs; arylsulfatases, which are useful for converting sulfate-containing prodrugs into free drugs; proteases, such as Serratia protease, thermolysin, subtilisin, carboxypeptidases and cathepsins (such as cathepsins B and L), which are useful for converting peptide-containing prodrugs into free drugs; D-alanylcarboxypeptidases, which are useful for converting prodrugs that contain D-amino acid substituents; carbohydrate-cleaving enzymes such as β-galactosidase and neuraminidase, which are useful for converting glycosylated prodrugs into free drugs; β-lactamase, which is useful for converting drugs derivatized with β-lactams into free drugs; and penicillin amidases, such as penicillin V amidase and penicillin G amidase, which are useful for converting drugs derivatized at their amine nitrogens with phenoxyacetyl or phenylacetyl groups, respectively, into free drugs. In some embodiments, enzymes may be covalently bound to antibody moieties by recombinant DNA techniques well known in the art. See, e.g., Neuberger et al., Nature 312:604-608 (1984).

[0198] In some embodiments, therapeutic portion of the immunoconjugates (e.g., an ADC) may be a nucleic acid. Nucleic acids that may be used include, but are not limited to, antisense RNA, genes or other polynucleotides, including nucleic acid analogs such as thioguanine and thiopurine.

[0199] The present application further provides immunoconjugates (e.g., an ADC) comprising an antibody moiety attached to an effector molecule, wherein the effector molecule is a label, which can generate a detectable signal, indirectly or directly. These immunoconjugates can be used for research or diagnostic applications, such as for the in vivo detection of cancer. The label is preferably capable of producing, either directly or indirectly, a detectable signal. For example, the label may be radio-opaque or a radioisotope, such as 3H, 14C, 32P, 35S, 123I, 125I, 131I; a fluorescent (fluorophore) or chemiluminescent (chromophore) compound, such as fluorescein isothiocyanate, rhodamine or luciferin; an enzyme, such as alkaline phosphatase, β-galactosidase or horseradish peroxidase; an imaging agent; or a metal ion. In some embodiments, the label is a radioactive atom for scintigraphic studies, for example, 99Tc or 123I, or a spin label for nuclear magnetic resonance (NMR) imaging (also known as magnetic resonance imaging, MRI), such as zirconium-89, iodine-123, iodine-131, indium-111, fluorine-19, carbon-13, nitrogen-15, oxygen-17, gadolinium, manganese or iron. Zirconium-89 may be complexed to various metal chelating agents and conjugated to antibodies, e.g., for PET imaging (WO 2011/056983).

[0200] In some embodiments, the immunoconjugate is detectable indirectly. For example, a secondary antibody that is specific for the immunoconjugate and contains a detectable label can be used to detect the immunoconjugate.

[0201] V. Immune Cells

[0202] The present invention provides immune cells comprising: a chimeric antigen receptor (CAR) that comprises (i) an extracellular target-binding domain comprising an antibody moiety; (ii) a transmembrane domain; and (iii) a primary signaling domain, and a chimeric stimulating receptor (CSR) that comprises (i) a ligand-binding module that is capable of binding or interacting with a target ligand; (ii) a transmembrane domain; and (iii) a CD30 costimulatory domain, in which the CSR in the immune cells lacks a functional primary signaling domain. In some embodiments, the immune cell comprises one or more nucleic acids encoding the CAR and CSR, wherein the CAR and CSR are expressed from the nucleic acid and localized to the immune cell surface. In some embodiments, the immune cell is a T cell. In some embodiments, the immune cell is selected from the group consisting of a cytotoxic T cell, a helper T cell, a natural killer T cell, and a suppressor T cell. In some embodiments, the immune cell is modified to block or decrease the expression of one or more of the endogenous TCR subunits of the immune cell. For example, in some embodiments, the immune cell is an αβ T cell modified to block or decrease the expression of the TCR α and/or β chains or the immune cell is a γδ T cell modified to block or decrease the expression of the TCR γ and/or δ chains. Modifications of cells to disrupt gene expression include any such techniques known in the art, including for example RNA interference (e.g., siRNA, shRNA, miRNA), gene editing (e.g., CRISPR- or TALEN-based gene knockout), and the like.

[0203] In exemplary embodiments, the cell of the present disclosure is an immune cell or a cell of the immune system. Accordingly, the cell may be a B-lymphocyte, T-lymphocyte, thymocyte, dendritic cell, natural killer (NK) cell, monocyte, macrophage, granulocyte, eosinophil, basophil, neutrophil, myelomonocytic cell, megakaryocyte, peripheral blood mononuclear cell, myeloid progenitor cell, or a hematopoietic stem cell. In exemplary aspects, the cell is a T lymphocyte. In exemplary aspects, the T lymphocyte is CD8⁺, CD4⁺, CD8⁺/CD4⁺, or a T-regulatory (T-reg) cell. In exemplary embodiments, the T lymphocyte is genetically engineered to silence the expression of an endogenous TCR. In exemplary aspects, the cell is a natural killer (NK) cell.

[0204] For example, in some embodiments, there is provided an immune cell (such as a T cell) comprising one or more nucleic acids encoding a CAR and a CSR according to any of the CARs and CSRs described herein, wherein the CAR and CSR are expressed from the nucleic acid and localized to the immune cell surface. In some embodiments, the nucleic acid sequence is contained in a vector. Vectors may be selected, for example, from the group consisting of mammalian expression vectors and viral vectors (such as those derived from retroviruses, adenoviruses, adeno-associated viruses, herpes viruses, and lentiviruses). In some embodiments, one or more of the vectors is integrated into the host genome of the immune cell. In some embodiments, the nucleic acid sequence is under the control of a promoter. In some embodiments, the promoter is inducible. In some embodiments, the promoter is operably linked to the 5′ end of the nucleic acid sequence. In some embodiments, the immune cell is selected from the group consisting of a cytotoxic T cell, a helper T cell, a natural killer T cell, and a suppressor T cell.

[0205] Thus, in some embodiments, there is provided a immune cell (such as a T cell) expressing on its surface a CAR and CSR described herein, wherein the immune cell comprises: a nucleic acid sequence encoding a CAR polypeptide chain of the CAR and a CSR polypeptide chain of the CSR, wherein the CAR polypeptide chain and the CSR polypeptide chain are expressed from the nucleic acid sequence as a single polypeptide chain. The single polypeptide chain is then cleaved to form a CAR polypeptide chain and a CSR polypeptide chain, and the CAR polypeptide chain and the CSR polypeptide chain localize to the surface of the immune cell.

[0206] In other embodiments, there is provided a immune cell (such as a T cell) expressing on its surface a CAR and CSR described herein, wherein the immune cell comprises: a CAR nucleic acid sequence encoding a CAR polypeptide chain of the CAR, and a CSR nucleic acid sequence encoding a CSR polypeptide chain of the CSR, wherein the CAR polypeptide chain is expressed from the CAR nucleic acid sequence to form the CAR, wherein the CSR polypeptide chain is expressed from the CSR nucleic acid sequence to form the CSR, and wherein the CAR and CSR localize to the surface of the immune cell.

[0207] VI. Fc Variants

[0208] In some embodiments, CARs and/or CSRs described herein may comprise a variant Fc region, wherein the variant Fc region may comprise at least one amino acid modification relative to a reference Fc region (or parental Fc region or a wild-type Fc region). Amino acid modifications may be made in an Fc region to alter effector function and/or to increase serum stability of the CAR and/or CSR. CARs and/or CSRs comprising variant Fc regions may demonstrate an altered affinity for an Fc receptor (e.g., an FcγR), provided that the variant Fc regions do not have a substitution at positions that make a direct contact with Fc receptor based on crystallographic and structural analysis of Fc-Fc receptor interactions such as those disclosed by Sondermann et al., 2000, Nature, 406:267-273. Examples of positions within the Fc region that make a direct contact with an Fc receptor such as an FcγR are amino acids 234-239 (hinge region), amino acids 265-269 (B/C loop), amino acids 297-299 (C′/E loop), and amino acids 327-332 (F/G) loop. In some embodiments, CARs and/or CSRs comprising variant Fc regions may comprise a modification of at least one residue that makes a direct contact with an FcγR based on structural and crystallographic analysis.

[0209] Amino acid modifications in Fc regions to create variant Fc regions that, e.g., alter affinity for activating and/or inhibitory receptors, lead to improved effector function such as, e.g., Antibody-Dependent Cell-Mediated Cytotoxicity (ADCC) and Complement Dependent Cytotoxicity (CDC), increase binding affinity for C1q, reduce or eliminate FcR binding, increase half-life are known in the art (see, e.g., U.S. Pat. Nos. 9,051,373, 9,040,041, 8,937,158, 8,883,973, 8,883,147, 8,858,937, 8,852,586, 8,809,503, 8,802,823, 8,802,820, 8,795,661, 8,753,629, 8,753,628, 8,735,547, 8,735,545, 8,734,791, 8,697,396, 8,546,543, 8,475,792, 8,399,618, 8,394,925, 8,388,955, 8,383,109, 8,367,805, 8,362,210, 8,338,574, 8,324,351, 8,318,907, 8,188,231, 8,124,731, 8,101,720, 8,093,359, 8,093,357, 8,088,376, 8,084,582, 8,039,592, 8,012,476, 7,799,900, 7,790,858, 7,785,791, 7,741,072, 7,704,497, 7,662,925, 7,416,727, 7,371,826, 7,364,731, 7,335,742, 7,332,581, 7,317,091, 7,297,775, 7,122,637, 7,083,784, 6,737,056, 6,538,124, 6,528,624 and 6,194,551).

[0210] In some embodiments, a variant Fc region may have different glycosylation patterns as compared to a parent Fc region (e.g., aglycosylated). In some embodiments, different glycosylation patterns may arise from expression in different cell lines, e.g., an engineered cell line.

[0211] CARs and/or CSRs described herein may comprise variant Fc regions that bind with a greater affinity to one or more FcγRs. Such CARs and/or CSRs preferably mediate effector function more effectively as discussed infra. In some embodiments, CARs and/or CSRs described herein may comprise variant Fc regions that bind with a weaker affinity to one or more FcγRs. Reduction or elimination of effector function may be desirable in certain cases, for example, in the case of CARs and/or CSRs whose mechanism of action involves blocking or antagonism but not killing of the cells bearing a target antigen. In some embodiments, increased effector function may be directed to tumor cells and cells expressing foreign antigens.

[0212] VII. Nucleic Acids

[0213] Nucleic acid molecules encoding the CARs and CSRs described herein are also contemplated. In some embodiments, according to any of the CARs and CSRs described herein, there is provided a nucleic acid (or a set of nucleic acids) encoding the CARs and CSRs.

[0214] The present invention also provides vectors in which a nucleic acid of the present invention is inserted.

[0215] In brief summary, the expression of a CAR and/or CSR described herein by a nucleic acid encoding the CAR and/or CSR can be achieved by inserting the nucleic acid into an appropriate expression vector, such that the nucleic acid is operably linked to 5′ and 3′ regulatory elements, including for example a promoter (e.g., a lymphocyte-specific promoter) and a 3′ untranslated region (UTR). The vectors can be suitable for replication and integration in eukaryotic host cells. Typical cloning and expression vectors contain transcription and translation terminators, initiation sequences, and promoters useful for regulation of the expression of the desired nucleic acid sequence.

[0216] The nucleic acids of the present invention may also be used for nucleic acid immunization and gene therapy, using standard gene delivery protocols. Methods for gene delivery are known in the art. See, e.g., U.S. Pat. Nos. 5,399,346, 5,580,859, 5,589,466, incorporated by reference herein in their entireties. In some embodiments, the invention provides a gene therapy vector.

[0217] The nucleic acid can be cloned into a number of types of vectors. For example, the nucleic acid can be cloned into a vector including, but not limited to, a plasmid, a phagemid, a phage derivative, an animal virus, and a cosmid. Vectors of particular interest include expression vectors, replication vectors, probe generation vectors, and sequencing vectors.

[0218] Further, the expression vector may be provided to a cell in the form of a viral vector. Viral vector technology is well known in the art and is described, for example, in Sambrook et al. (2001, Molecular Cloning: A Laboratory Manual, Cold Spring Harbor Laboratory, New York), and in other virology and molecular biology manuals. Viruses which are useful as vectors include, but are not limited to, retroviruses, adenoviruses, adeno-associated viruses, herpes viruses, and lentiviruses. In general, a suitable vector contains an origin of replication functional in at least one organism, a promoter sequence, convenient restriction endonuclease sites, and one or more selectable markers (see, e.g., WO 01/96584; WO 01/29058; and U.S. Pat. No. 6,326,193).

[0219] A number of viral based systems have been developed for gene transfer into mammalian cells. For example, retroviruses provide a convenient platform for gene delivery systems. A selected gene can be inserted into a vector and packaged in retroviral particles using techniques known in the art. The recombinant virus can then be isolated and delivered to cells of the subject either in vivo or ex vivo. A number of retroviral systems are known in the art. In some embodiments, adenovirus vectors are used. A number of adenovirus vectors are known in the art. In some embodiments, lentivirus vectors are used. Vectors derived from retroviruses such as the lentivirus are suitable tools to achieve long-term gene transfer since they allow long-term, stable integration of a transgene and its propagation in daughter cells. Lentiviral vectors have the added advantage over vectors derived from onco-retroviruses such as murine leukemia viruses in that they can transduce non-proliferating cells, such as hepatocytes. They also have the added advantage of low immunogenicity.

[0220] Additional promoter elements, e.g., enhancers, regulate the frequency of transcriptional initiation. Typically, these are located in the region 30-110 bp upstream of the start site, although a number of promoters have recently been shown to contain functional elements downstream of the start site as well. The spacing between promoter elements frequently is flexible, so that promoter function is preserved when elements are inverted or moved relative to one another. In the thymidine kinase (tk) promoter, the spacing between promoter elements can be increased to 50 bp apart before activity begins to decline.

[0221] One example of a suitable promoter is the immediate early cytomegalovirus (CMV) promoter sequence. This promoter sequence is a strong constitutive promoter sequence capable of driving high levels of expression of any polynucleotide sequence operatively linked thereto. Another example of a suitable promoter is Elongation Growth Factor-1α (EF-1α). However, other constitutive promoter sequences may also be used, including, but not limited to the simian virus 40 (SV40) early promoter, mouse mammary tumor virus (MMTV), human immunodeficiency virus (HIV) long terminal repeat (LTR) promoter, MoMuLV promoter, an avian leukemia virus promoter, an Epstein-Barr virus immediate early promoter, a Rous sarcoma virus promoter, as well as human gene promoters such as, but not limited to, the actin promoter, the myosin promoter, the hemoglobin promoter, and the creatine kinase promoter.

[0222] Further, the invention should not be limited to the use of constitutive promoters. Inducible promoters are also contemplated as part of the invention. The use of an inducible promoter provides a molecular switch capable of turning on expression of the polynucleotide sequence which it is operatively linked when such expression is desired, or turning off the expression when expression is not desired. Exemplary inducible promoter systems for use in eukaryotic cells include, but are not limited to, hormone-regulated elements (e.g., see Mader, S. and White, J. H. (1993) Proc. Natl. Acad. Sci. USA 90:5603-5607), synthetic ligand-regulated elements (see, e.g., Spencer, D. M. et al 1993) Science 262: 1019-1024) and ionizing radiation-regulated elements (e.g., see Manome, Y. et al. (1993) Biochemistry 32: 10607-10613; Datta, R. et al. (1992) Proc. Natl. Acad. Sci. USA 89: 1014-10153). Further exemplary inducible promoter systems for use in in vitro or in vivo mammalian systems are reviewed in Gingrich et al. (1998) Annual Rev. Neurosci 21:377-405.

[0223] An exemplary inducible promoter system for use in the present invention is the Tet system. Such systems are based on the Tet system described by Gossen et al. (1993). In an exemplary embodiment, a polynucleotide of interest is under the control of a promoter that comprises one or more Tet operator (TetO) sites. In the inactive state, Tet repressor (TetR) will bind to the TetO sites and repress transcription from the promoter. In the active state, e.g., in the presence of an inducing agent such as tetracycline (Tc), anhydrotetracycline, doxycycline (Dox), or an active analog thereof, the inducing agent causes release of TetR from TetO, thereby allowing transcription to take place. Doxycycline is a member of the tetracycline family of antibiotics having the chemical name of 1-dimethylamino-2,4a,5,7,12-pentahydroxy-11-methyl-4,6-dioxo-1,4a,11,11a,12,12a-hexahydrotetracene-3-carboxamide.

[0224] In one embodiment, a TetR is codon-optimized for expression in mammalian cells, e.g., murine or human cells. Most amino acids are encoded by more than one codon due to the degeneracy of the genetic code, allowing for substantial variations in the nucleotide sequence of a given nucleic acid without any alteration in the amino acid sequence encoded by the nucleic acid. However, many organisms display differences in codon usage, also known as “codon bias” (i.e., bias for use of a particular codon(s) for a given amino acid). Codon bias often correlates with the presence of a predominant species of tRNA for a particular codon, which in turn increases efficiency of mRNA translation. Accordingly, a coding sequence derived from a particular organism (e.g., a prokaryote) may be tailored for improved expression in a different organism (e.g., a eukaryote) through codon optimization.

[0225] Other specific variations of the Tet system include the following “Tet-Off” and “Tet-On” systems. In the Tet-Off system, transcription is inactive in the presence of Tc or Dox. In that system, a tetracycline-controlled transactivator protein (tTA), which is composed of TetR fused to the strong transactivating domain of VP16 from Herpes simplex virus, regulates expression of a target nucleic acid that is under transcriptional control of a tetracycline-responsive promoter element (TRE). The TRE is made up of TetO sequence concatamers fused to a promoter (commonly the minimal promoter sequence derived from the human cytomegalovirus (hCMV) immediate-early promoter). In the absence of Tc or Dox, tTA binds to the TRE and activates transcription of the target gene. In the presence of Tc or Dox, tTA cannot bind to the TRE, and expression from the target gene remains inactive.

[0226] Conversely, in the Tet-On system, transcription is active in the presence of Tc or Dox. The Tet-On system is based on a reverse tetracycline-controlled transactivator, rtTA. Like tTA, rtTA is a fusion protein comprised of the TetR repressor and the VP16 transactivation domain. However, a four amino acid change in the TetR DNA binding moiety alters rtTA's binding characteristics such that it can only recognize the tetO sequences in the TRE of the target transgene in the presence of Dox. Thus, in the Tet-On system, transcription of the TRE-regulated target gene is stimulated by rtTA only in the presence of Dox.

[0227] Another inducible promoter system is the lac repressor system from E. coli. (See, Brown et al., Cell 49:603-612 (1987). The lac repressor system functions by regulating transcription of a polynucleotide of interest operably linked to a promoter comprising the lac operator (lacO). The lac repressor (lacR) binds to LacO, thus preventing transcription of the polynucleotide of interest. Expression of the polynucleotide of interest is induced by a suitable inducing agent, e.g., isopropyl-β-D-thiogalactopyranoside (IPTG).

[0228] Another exemplary inducible promoter system for use in the present invention is the nuclear-factor of the activated T-cell (NFAT) system. The NFAT family of transcription factors are important regulators of T cell activation. NFAT response elements are found, for example, in the IL-2 promoter (see for example Durand, D. et. al., Molec. Cell. Biol. 8, 1715-1724 (1988); Clipstone, N A, Crabtree, G R. Nature. 1992 357(6380): 695-7; Chmielewski, M., et al. Cancer research 71.17 (2011): 5697-5706; and Zhang, L., et al. Molecular therapy 19.4 (2011): 751-759). In some embodiments, an inducible promoter described herein comprises one or more (such as 2, 3, 4, 5, 6, or more) NFAT response elements. In some embodiments, the inducible promoter comprises 6 NFAT response elements, for example, comprising the nucleotide sequence of SEQ ID NO:112. In some embodiments, an inducible promoter described herein comprises one or more (such as 2, 3, 4, 5, 6, or more) NFAT response elements linked to a minimal promoter, such as a minimal TA promoter. In some embodiments, the minimal TA promoter comprises the nucleotide sequence of SEQ ID NO:113. In some embodiments, the inducible promoter comprises the nucleotide sequence of SEQ ID NO: 114.

[0229] In order to assess the expression of a polypeptide or portions thereof, the expression vector to be introduced into a cell can also contain either a selectable marker gene or a reporter gene or both to facilitate identification and selection of expressing cells from the population of cells sought to be transfected or infected through viral vectors. In other aspects, the selectable marker may be carried on a separate piece of DNA and used in a co-transfection procedure. Both selectable markers and reporter genes may be flanked with appropriate regulatory sequences to enable expression in the host cells. Useful selectable markers include, for example, antibiotic-resistance genes, such as neo and the like.

[0230] Reporter genes are used for identifying potentially transfected cells and for evaluating the functionality of regulatory sequences. In general, a reporter gene is a gene that is not present in or expressed by the recipient organism or tissue and that encodes a polypeptide whose expression is manifested by some easily detectable property, e.g., enzymatic activity. Expression of the reporter gene is assayed at a suitable time after the DNA has been introduced into the recipient cells. Suitable reporter genes may include genes encoding luciferase, β-galactosidase, chloramphenicol acetyl transferase, secreted alkaline phosphatase, or the green fluorescent protein gene (e.g., Ui-Tel et al., 2000 FEBS Letters 479: 79-82). Suitable expression systems are well known and may be prepared using known techniques or obtained commercially. In general, the construct with the minimal 5′ flanking region showing the highest level of expression of reporter gene is identified as the promoter. Such promoter regions may be linked to a reporter gene and used to evaluate agents for the ability to modulate promoter-driven transcription.

[0231] In some embodiments, there is provided nucleic acid encoding a CAR and/or CSR according to any of the CARs and CSRs described herein. In some embodiments, the nucleic acid comprises one or more nucleic acid sequences encoding all of the polypeptide chains of the CAR. In some embodiments, the nucleic acid comprises one or more nucleic acid sequences encoding all of the polypeptide chains of the CSR. In some embodiments, the nucleic acid comprises one or more nucleic acid sequences encoding all of the polypeptide chains of the CAR and the CSR. In some embodiments, each of the one or more nucleic acid sequences is contained in separate vectors. In some embodiments, at least some of the nucleic acid sequences are contained in the same vector. In some embodiments, all of the nucleic acid sequences are contained in the same vector. Vectors may be selected, for example, from the group consisting of mammalian expression vectors and viral vectors (such as those derived from retroviruses, adenoviruses, adeno-associated viruses, herpes viruses, and lentiviruses).

[0232] For example, in some embodiments, the CAR is a monomer comprising a single CAR polypeptide chain and the CSR is a monomer comprising a single CSR polypeptide chain, and the nucleic acid comprises a first nucleic acid sequence encoding the CAR polypeptide chain, and a second nucleic acid sequence encoding the CSR polypeptide chain. In some embodiments, the first nucleic acid sequence is contained in a first vector and the second nucleic acid sequence is contained in a second vector. In some embodiments, the first and second nucleic acid sequences are contained in one vector. In some embodiments, the first nucleic acid sequence is under the control of a first promoter, and the second nucleic acid sequence is under the control of a second promoter. In some embodiments, the first and second promoters have the same sequence. In some embodiments, the first and second nucleic acid sequences are expressed as a single transcript under the control of a single promoter in a multicistronic vector. See for example Kim, J H, et al., PLoS One 6(4):e18556, 2011. In some embodiments, one or more of the promoters are inducible. In some embodiments, the nucleic acid sequence encoding the CSR polypeptide chain is operably linked to an inducible promoter. In some embodiments, the inducible promoter comprises one or more elements responsive to immune cell activation, such as NFAT response elements.

[0233] In some embodiments, the first and second nucleic acid sequences have similar (such as substantially or about the same) expression levels in a host cell (such as a T cell). In some embodiments, the first and second nucleic acid sequences have expression levels in a host cell (such as a T cell) that differ by at least about two (such as at least about any of 2, 3, 4, 5, or more) times. Expression can be determined at the mRNA or protein level. The level of mRNA expression can be determined by measuring the amount of mRNA transcribed from the nucleic acid using various well-known methods, including Northern blotting, quantitative RT-PCR, microarray analysis and the like. The level of protein expression can be measured by known methods including immunocytochemical staining, enzyme-linked immunosorbent assay (ELISA), western blot analysis, luminescent assays, mass spectrometry, high performance liquid chromatography, high-pressure liquid chromatography-tandem mass spectrometry, and the like.

[0234] Thus, in some embodiments, there is provided a nucleic acid encoding a) a CAR polypeptide chain according to any of the CARs described herein; and b) a CSR polypeptide chain according to any of the CSRs described herein. In some embodiments, the nucleic acid sequence is contained in a vector (such as a lentiviral vector). In some embodiments, the portion of the nucleic acid encoding the CAR polypeptide chain is under the control of a first promoter, and the portion of the nucleic acid encoding the CSR polypeptide chain is under the control of a second promoter. In some embodiments, the first promoter is operably linked to the 5′ end of the CAR nucleic acid sequence. In some embodiments, the second promoter is operably linked to the 5′ end of the CSR nucleic acid sequence. In some embodiments, only one promoter is used. In some embodiments, there is nucleic acid linker selected from the group consisting of an internal ribosomal entry site (IRES) and a nucleic acid encoding a self-cleaving 2A peptide (such as P2A, T2A, E2A, or F2A) linking the 3′ end of the CAR nucleic acid sequence to the 5′ end of the CSR nucleic acid sequence, or the 5′ end of the promoter that is linked to the CSR, if the promoter specific to the CAR is present. In some embodiments, there is nucleic acid linker selected from the group consisting of an internal ribosomal entry site (IRES) and a nucleic acid encoding a self-cleaving 2A peptide (such as P2A, T2A, E2A, or F2A) linking the 3′ end of the CSR nucleic acid sequence to the 5′ end of the CAR nucleic acid sequence, or the 5′ end of the promoter that is linked to the CAR, if the promoter specific to the CAR is present. In some embodiments, the CAR nucleic acid sequence and the CSR nucleic acid sequence are transcribed as a single RNA under the control of one promoter.

[0235] Thus, in some embodiments, there is provided two nucleic acids, wherein a first nucleic acid encodes a CAR polypeptide chain according to any of the CARs described herein; and a second nucleic acid encodes a CSR polypeptide chain according to any of the CSRs described herein. In some embodiments, the two nucleic acids are contained in two vectors (such as lentiviral vectors).

[0236] In some embodiments, the first and/or second promoters are inducible. In some embodiments, the first and/or second vectors are viral vectors (such as lentiviral vectors). It is to be appreciated that embodiments where any of the nucleic acid sequences are swapped are also contemplated, such as where the CAR nucleic acid sequence is swapped with the CSR nucleic acid sequence.

[0237] VII. CAR and CSR Production

[0238] Provided CARs and/or CSRs or portions thereof, or nucleic acids encoding them, may be produced by any available means. Methods for production are well-known in the art. Technologies for generating antibodies (e.g., scFv antibodies, monoclonal antibodies, and/or polyclonal antibodies) are available in the art. It will be appreciated that a wide range of animal species can be used for the production of antisera, e.g., mouse, rat, rabbit, pig, cow, deer, sheep, goat, cat, dog, monkey, and chicken. The choice of animal may be decided upon the ease of manipulation, costs or the desired amount of sera, as would be known to one of skill in the art. It will be appreciated that antibodies can also be produced transgenically through the generation of a mammal or plant that is transgenic for the immunoglobulin heavy and light chain sequences of interest (e.g., a transgenic rodent transgenic for human immunoglobulin heavy and light chain genes). In connection with the transgenic production in mammals, antibodies can be produced in, and recovered from, the milk of goats, cows, or other mammals (see, e.g., U.S. Pat. Nos. 5,827,690, 5,756,687, 5,750,172, and 5,741,957; herein incorporated by reference in their entireties). Alternatively, antibodies may be made in chickens, producing IgY molecules (Schade et al., 1996, ALTEX 13(5):80-85).

[0239] Although embodiments employing CARs and/or CSRs that contain human antibodies having, i.e., human heavy and light chain variable region sequences including human CDR sequences, are extensively discussed herein, the present invention also provides CARs and/or CSRs that contain non-human antibodies. In some embodiments, non-human antibodies comprise human CDR sequences from an antibody as described herein and non-human framework sequences. Non-human framework sequences include, in some embodiments, any sequence that can be used for generating synthetic heavy and/or light chain variable regions using one or more human CDR sequences as described herein, including, e.g., sequences generated from mouse, rat, rabbit, pig, cow, deer, sheep, goat, cat, dog, monkey, chicken, etc. In some embodiments, a provided CAR or CSR includes an antibody generated by grafting one or more human CDR sequences as described herein onto a non-human framework sequence (e.g., a mouse or chicken framework sequence). In many embodiments, provided CARs or CSRs comprise or are human antibodies (e.g., a human monoclonal antibody or fragment thereof, human antigen-binding protein or polypeptide, human multispecific antibody (e.g., a human bispecific antibody), a human polypeptide having one or more structural components of a human immunoglobulin polypeptide).

[0240] In some embodiments, antibodies suitable for the present invention are subhuman primate antibodies. For example, general techniques for raising therapeutically useful antibodies in baboons may be found, for example, in International Patent Application Publication No. 1991/11465 and in Losman et al., 1990, Int. J. Cancer 46:310. In some embodiments, antibodies (e.g., monoclonal antibodies) may be prepared using hybridoma methods (Milstein and Cuello, 1983, Nature 305(5934):537-40). In some embodiments, antibodies (e.g., monoclonal antibodies) may also be made by recombinant methods (see, e.g., U.S. Pat. No. 4,166,452).

[0241] Many of the difficulties associated with generating antibodies by B-cell immortalization can be overcome by engineering and expressing CAR or CSR components in E. coli or yeast using phage display. To ensure the recovery of high affinity antibodies a combinatorial immunoglobulin library must typically contain a large repertoire size. A typical strategy utilizes mRNA obtained from lymphocytes or spleen cells of immunized mice to synthesize cDNA using reverse transcriptase. The heavy and light chain genes are amplified separately by PCR and ligated into phage cloning vectors. Two different libraries may be produced, one containing the heavy chain genes and one containing the light chain genes. The libraries can be naïve or they can be semi-synthetic, i.e., with all amino acids (with the exception of cysteine) equally likely to be present at any given position in a CDR. Phage DNA is isolated from each library, and the heavy and light chain sequences are ligated together and packaged to form a combinatorial library. Each phage contains a random pair of heavy and light chain cDNAs and upon infection of E. coli directs the expression of the polypeptides in a CAR or CSR in infected cells. To identify a CAR or CSR that recognizes the antigen of interest, the phage library is plated, and the CAR or CSR molecules present in the plaques are transferred to filters. The filters are incubated with radioactively labeled antigen and then washed to remove excess unbound ligand. A radioactive spot on the autoradiogram identifies a plaque that contains a CAR or CSR that binds the antigen. Alternatively, identification of a CAR or CSR that recognizes the antigen of interest may be achieved by iterative binding of phage to the antigen, which is bound to a solid support, for example, beads or mammalian cells followed by removal of non-bound phage and by elution of specifically bound phage. In such embodiments, antigens are first biotinylated for immobilization to, for example, streptavidin-conjugated Dynabeads M-280. The phage library is incubated with the cells, beads or other solid support and non-binding phage is removed by washing. CAR or CSR phage clones that bind the antigen of interest are selected and tested for further characterization.

[0242] Once selected, positive clones may be tested for their binding to the antigen of interest expressed on the surface of live cells by flow cytometry. Briefly, phage clones may be incubated with cells (e.g., engineered to express the antigen of interest, or those that naturally express the antigen) that either do or do not express the antigen. The cells may be washed and then labeled with a mouse anti-M13 coat protein monoclonal antibody. Cells may be washed again and labeled with a fluorescent-conjugated secondary antibody (e.g., FITC-goat (Fab)₂ anti-mouse IgG) prior to flow cytometry. Cloning and expression vectors that are useful for producing a human immunoglobulin phage library can be obtained, for example, from Stratagene Cloning Systems (La Jolla, Calif.).

[0243] A similar strategy may be employed to obtain high-affinity scFv clones. A library with a large repertoire may be constructed by isolating V-genes from non-immunized human donors using PCR primers corresponding to all known V_{H}, Vκ and Vλ gene families. Following amplification, the Vκ and Vλ pools may be combined to form one pool. These fragments may be ligated into a phagemid vector. An scFv linker (e.g., (G₄S)n) may be ligated into the phagemid upstream of the V_{L} fragment (or upstream of the V_{H} fragment as so desired). The V_{H} and linker-V_{L} fragments (or V_{L} and linker-V_{H} fragments) may be amplified and assembled on the JH region. The resulting V_{H}-linker-V_{L} (or V_{L}-linker-V_{H}) fragments may be ligated into a phagemid vector. The phagemid library may be panned using filters, as described above, or using immunotubes (Nunc; Maxisorp). Similar results may be achieved by constructing a combinatorial immunoglobulin library from lymphocytes or spleen cells of immunized rabbits and by expressing the scFv in P. pastoris (see, e.g., Ridder et al., 1995, Biotechnology, 13:255-260). Additionally, following isolation of appropriate scFv antibodies, higher binding affinities and slower dissociation rates may be obtained through affinity maturation processes such as mutagenesis and chain-shuffling (see, e.g., Jackson et al., 1998, Br. J. Cancer, 78:181-188); Osbourn et al., 1996, Immunotechnology, 2:181-196).

[0244] Human antibodies may be produced using various techniques, i.e., introducing human Ig genes into transgenic animals in which the endogenous Ig genes have been partially or completely inactivated can be exploited to synthesize human antibodies. In some embodiments, human antibodies may be made by immunization of non-human animals engineered to make human antibodies in response to antigen challenge with human antigen.

[0245] Provided CARs and CSRs may be also produced, for example, by utilizing a host cell system engineered to express a CAR- or CSR-encoding nucleic acid. Alternatively or additionally, provided CARs may be partially or fully prepared by chemical synthesis (e.g., using an automated peptide synthesizer or gene synthesis of CAR- or CSR-encoding nucleic acids). CARs and/or CSRs described herein may be expressed using any appropriate vector or expression cassette. A variety of vectors (e.g., viral vectors) and expression cassettes are known in the art and cells into which such vectors or expression cassettes may be introduced may be cultured as known in the art (e.g., using continuous or fed-batch culture systems). In some embodiments, cells may be genetically engineered; technologies for genetically engineering cells to express engineered polypeptides are well known in the art (see, e.g., Ausabel et al., eds., 1990, Current Protocols in Molecular Biology (Wiley, New York)).

[0246] CARs and/or CSRs described herein may be purified, i.e., using filtration, centrifugation, and/or a variety of chromatographic technologies such as HPLC or affinity chromatography. In some embodiments, fragments of provided CARs and/or CSRs are obtained by methods that include digestion with enzymes, such as pepsin or papain, and/or by cleavage of disulfide bonds by chemical reduction.

[0247] It will be appreciated that provided CARs and/or CSRs may be engineered, produced, and/or purified in such a way as to improve characteristics and/or activity of the CARs and/or CSRs. For example, improved characteristics include, but are not limited to, increased stability, improved binding affinity and/or avidity, increased binding specificity, increased production, decreased aggregation, decreased nonspecific binding, among others. In some embodiments, provided CARs and/or CSRs may comprise one or more amino acid substitutions (e.g., in a framework region in the context of an immunoglobulin or fragment thereof (e.g., an scFv antibody)) that improve protein stability, antigen binding, expression level, or provides a site or location for conjugation of a therapeutic, diagnostic or detection agent.

[0248] Purification Tag

[0249] In some embodiments, a purification tag may be joined to a CAR and/or CSR described herein. A purification tag refers to a peptide of any length that can be used for purification, isolation, or identification of a polypeptide. A purification tag may be joined to a polypeptide (e.g., joined to the N- or C-terminus of the polypeptide) to aid in purifying the polypeptide and/or isolating the polypeptide from, e.g., a cell lysate mixture. In some embodiments, the purification tag binds to another moiety that has a specific affinity for the purification tag. In some embodiments, such moieties which specifically bind to the purification tag are attached to a solid support, such as a matrix, a resin, or agarose beads. Examples of a purification tag that may be joined to a CAR or CSR include, but are not limited to, a hexa-histidine peptide, a hemagglutinin (HA) peptide, a FLAG peptide, and a myc peptide. In some embodiments, two or more purification tags may be joined to a CAR or CSR, e.g., a hexa-histidine peptide and a HA peptide. A hexa-histidine peptide (HHHHHH (SEQ ID NO:93)) binds to nickel-functionalized agarose affinity column with micromolar affinity. In some embodiments, an HA peptide includes the sequence YPYDVPDYA (SEQ ID NO:94) or YPYDVPDYAS (SEQ ID NO:95). In some embodiments, an HA peptide includes integer multiples of the sequence YPYDVPDYA (SEQ ID NO:94) or YPYDVPDYAS (SEQ ID NO:95) in tandem series, e.g., 3xYPYDVPDYA or 3xYPYDVPDYAS. In some embodiments, a FLAG peptide includes the sequence DYKDDDDK (SEQ ID NO:96). In some embodiments, a FLAG peptide includes integer multiples of the sequence DYKDDDDK (SEQ ID NO:96) in tandem series, e.g., 3xDYKDDDDK. In some embodiments, a myc peptide includes the sequence EQKLISEEDL (SEQ ID NO:97). In some embodiments, a myc peptide includes integer multiples of the sequence EQKLISEEDL in tandem series, e.g., 3xEQKLISEEDL.

[0250] IX. Therapeutic and Detection Agents

[0251] A therapeutic agent or a detection agent may be attached to a CAR or CSR described herein. Therapeutic agents may be any class of chemical entity including, for example, but not limited to, proteins, carbohydrates, lipids, nucleic acids, small organic molecules, non-biological polymers, metals, ions, radioisotopes, etc. In some embodiments, therapeutic agents for use in accordance with the present invention may have a biological activity relevant to the treatment of one or more symptoms or causes of cancer. In some embodiments, therapeutic agents for use in accordance with the present invention may have a biological activity relevant to modulation of the immune system and/or enhancement of T-cell mediated cytotoxicity. In some embodiments, therapeutic agents for use in accordance with the present invention have one or more other activities.

[0252] A detection agent may comprise any moiety that may be detected using an assay, for example due to its specific functional properties and/or chemical characteristics. Non-limiting examples of such agents include enzymes, radiolabels, haptens, fluorescent labels, phosphorescent molecules, chemiluminescent molecules, chromophores, luminescent molecules, photoaffinity molecules, colored particles or ligands, such as biotin.

[0253] Many detection agents are known in the art, as are systems for their attachment to proteins and peptides (see, for e.g., U.S. Pat. Nos. 5,021,236; 4,938,948; and 4,472,509). Examples of such detection agents include paramagnetic ions, radioactive isotopes, fluorochromes, NMR-detectable substances, X-ray imaging agents, among others. For example, in some embodiments, a paramagnetic ion is one or more of chromium (III), manganese (II), iron (III), iron (II), cobalt (II), nickel (II), copper (II), neodymium (III), samarium (III), ytterbium (III), gadolinium (III), vanadium (II), terbium (III), dysprosium (III), holmium (III), erbium (III), lanthanum (III), gold (III), lead (II), and/or bismuth (III).

[0254] The radioactive isotope may be one or more of actinium-225, astatine-211, bismuth-212, carbon-14, chromium-51, chlorine-36, cobalt-57, cobalt-58, copper-67, Europium-152, gallium-67, hydrogen-3, iodine-123, iodine-124, iodine-125, iodine-131, indium-111, iron-59, lead-212, lutetium-177, phosphorus-32, radium-223, radium-224, rhenium-186, rhenium-188, selenium-75, sulphur-35, technicium-99m, thorium-227, yttrium-90, and zirconium-89. Radioactively labeled CARs or CSRs may be produced according to well-known technologies in the art.

[0255] A fluorescent label may be or may comprise one or more of Alexa 350, Alexa 430, AMCA, BODIPY 630/650, BODIPY 650/665, BODIPY-FL, BODIPY-R6G, BODIPY-TMR, BODIPY-TRX, Cascade Blue, Cy3, Cy5,6-FAM, Fluorescein Isothiocyanate, HEX, 6-JOE, Oregon Green 488, Oregon Green 500, Oregon Green 514, Pacific Blue, REG, Rhodamine Green, Rhodamine Red, Renographin, ROX, TAMRA, TET, Tetramethylrhodamine, and/or Texas Red, among others.

[0256] X. Methods of Treatment

[0257] The compositions of the invention can be administered to individuals (e.g., mammals such as humans) to treat diseases including viral infections and cancers (e.g., a hematological cancer or a solid tumor cancer).

[0258] Cancers that may be treated using any of the methods described herein include tumors that are not vascularized, or not yet substantially vascularized, as well as vascularized tumors. The cancers may comprise non-solid tumors (such as hematological tumors, for example, leukemias and lymphomas) or may comprise solid tumors. Types of cancers to be treated include, but are not limited to, carcinoma, blastoma, sarcoma, melanoma, neuroendocrine tumors, and glioma, and certain leukemia or lymphoid malignancies, benign and malignant tumors, and malignancies e.g., sarcomas, carcinomas, melanomas, and gliomas. Adult tumors/cancers and pediatric tumors/cancers are also included.

[0259] Solid tumors contemplated for treatment by any of the methods described herein include CNS tumors, such as glioma (e.g., brainstem glioma and mixed gliomas), glioblastoma (also known as glioblastoma multiforme), astrocytoma (such as high-grade astrocytoma), pediatric glioma or glioblastoma (such as pediatric high-grade glioma (HGG) and diffuse intrinsic pontine glioma (DIPG)), CNS lymphoma, germinoma, medulloblastoma, Schwannoma craniopharyogioma, ependymoma, pinealoma, hemangioblastoma, acoustic neuroma, oligodendroglioma, menangioma, neuroblastoma, retinoblastoma and brain metastases.

[0260] In some embodiments, the cancer is pediatric glioma. In some embodiments, the pediatric glioma is a low-grade glioma. In some embodiments, the pediatric glioma is a high-grade glioma (HGG). In some embodiments, the pediatric glioma is glioblastoma multiforme. In some embodiments, the pediatric glioma is diffuse intrinsic pontine glioma (DIPG). In some embodiments, the DIPG is grade II. In some embodiments, the DIPG is grade III. In some embodiments, the DIPG is grade IV.

[0261] Additional solid tumors contemplated for treatment include fibrosarcoma, myxosarcoma, liposarcoma, chondrosarcoma (such as clear-cell chondrosarcoma), chondroblastoma, osteosarcoma, and other sarcomas, synovioma, mesothelioma, Ewing's tumor, leiomyosarcoma, rhabdomyosarcoma, colon carcinoma, lymphoid malignancy, pancreatic cancer, breast cancer, lung cancers, ovarian cancer, prostate cancer, hepatocellular carcinoma, squamous cell carcinoma, basal cell carcinoma, adenocarcinoma, sweat gland carcinoma, medullary thyroid carcinoma, papillary thyroid carcinoma, pheochromocytomas sebaceous gland carcinoma, papillary carcinoma, papillary adenocarcinomas, medullary carcinoma, bronchogenic carcinoma, renal cell carcinoma, hepatoma, bile duct carcinoma, choriocarcinoma, Wilms' tumor, cervical cancer (e.g., cervical carcinoma and pre-invasive cervical dysplasia), cancer of the anus, anal canal, or anorectum, vaginal cancer, cancer of the vulva (e.g., squamous cell carcinoma, intraepithelial carcinoma, adenocarcinoma, and fibrosarcoma), penile cancer, oropharyngeal cancer, head cancers (e.g., squamous cell carcinoma), neck cancers (e.g., squamous cell carcinoma), testicular cancer (e.g., seminoma, teratoma, embryonal carcinoma, teratocarcinoma, choriocarcinoma, sarcoma, Leydig cell tumor, fibroma, fibroadenoma, adenomatoid tumors, and lipoma), bladder carcinoma, melanoma, cancer of the uterus (e.g., endometrial carcinoma), and urothelial cancers (e.g., squamous cell carcinoma, transitional cell carcinoma, adenocarcinoma, ureter cancer, and urinary bladder cancer).

[0262] Hematologic cancers contemplated for treatment by any of the methods described herein include leukemias, including acute leukemias (such as acute lymphocytic leukemia, acute myelocytic leukemia, acute myelogenous leukemia and myeloblastic, promyelocytic, myelomonocytic, monocytic and erythroleukemia), chronic leukemias (such as chronic myelocytic (granulocytic) leukemia, chronic myelogenous leukemia, and chronic lymphocytic leukemia), polycythemia vera, lymphoma, Hodgkin's disease, non-Hodgkin's lymphoma (indolent and high grade forms), multiple myeloma, Waldenstrom's macroglobulinemia, heavy chain disease, myelodysplastic syndrome, hairy cell leukemia and myelodysplasia.

[0263] Examples of other cancers include, without limitation, acute lymphoblastic leukemia (ALL), Hodgkin's lymphoma, non-Hodgkin's lymphoma, B cell chronic lymphocytic leukemia (CLL), multiple myeloma, follicular lymphoma, mantle cell lymphoma, pro-lymphocytic leukemia, hairy cell leukemia, common acute lymphocytic leukemia, and null-acute lymphoblastic leukemia.

[0264] Cancer treatments can be evaluated, for example, by tumor regression, tumor weight or size shrinkage, time to progression, duration of survival, progression free survival, overall response rate, duration of response, quality of life, protein expression and/or activity. Approaches to determining efficacy of therapy can be employed, including for example, measurement of response through radiological imaging.

[0265] In some embodiments of any of the methods for treating cancer (e.g., a hematological cancer or a solid tumor cancer), the CAR and CSR are conjugated to a cell (such as an immune cell, e.g., a T cell) prior to being administered to the individual. Thus, for example, there is provided a method of treating cancer (e.g., a hematological cancer or a solid tumor cancer) in an individual comprising a) conjugating a CAR and CSR described herein or an antibody moiety thereof to a cell (such as an immune cell, e.g., a T cell) to form a CAR+CSR/cell conjugate, and b) administering to the individual an effective amount of a composition comprising the CAR+CSR/cell conjugate. In some embodiments, the cell is derived from the individual. In some embodiments, the cell is not derived from the individual. In some embodiments, the CAR and CSR are conjugated to the cell by covalent linkage to a molecule on the surface of the cell. In some embodiments, the CAR and CSR are conjugated to the cell by non-covalent linkage to a molecule on the surface of the cell. In some embodiments, the CAR and CSR are conjugated to the cell by insertion of a portion of the CAR and a portion of the CSR into the outer membrane of the cell.

[0266] Treatments can be evaluated, for example, by tumor regression, tumor weight or size shrinkage, time to progression, duration of survival, progression free survival, overall response rate, duration of response, quality of life, protein expression and/or activity. Approaches to determining efficacy of therapy can be employed, including for example, measurement of response through radiological imaging.

[0267] In some embodiments, the efficacy of treatment may be measured as the percentage tumor growth inhibition (% TGI), which may be calculated using the equation 100−(T/C×100), where T is the mean relative tumor volume of the treated tumor, and C is the mean relative tumor volume of a non-treated tumor. In some embodiments, the % TGI is about 2%, about 4%, about 6, about 8%, 10%, about 20%, about 30%, about 40%, about 50%, about 60%, about 70%, about 80%, about 90%, about 91%, about 92%, about 93%, about 94%, about 95%, or more than 95%.

[0268] XI. Preparation of CAR Plus CSR Immune Cells

[0269] The present invention in one aspect provides immune cells (such as lymphocytes, for example T cells) expressing a CAR and a CSR according to any of the embodiments described herein. Exemplary methods of preparing immune cells (such as T cells) expressing a CAR and a CSR (CAR plus CSR immune cells, such as CAR plus CSR T cells) are provided herein.

[0270] In some embodiments, a CAR plus CSR immune cell (such as a CAR plus CSR T cell) can be generated by introducing one or more nucleic acids (including for example a lentiviral vector) encoding a CAR (such as any of the CARs described herein) that specifically binds to a target antigen (such as a disease-associated antigen) and a CSR (such as any of the CSRs described herein) that specifically binds to a target ligand into the immune cell. The introduction of the one or more nucleic acids into the immune cell can be accomplished using techniques known in the art, such as those described herein for Nucleic Acids. In some embodiments, the CAR plus CSR immune cells (such as CAR plus CSR T cells) of the invention are able to replicate in vivo, resulting in long-term persistence that can lead to sustained control of a disease associated with expression of the target antigen (such as cancer or viral infection).

[0271] In some embodiments, the invention relates to administering a genetically modified T cell expressing a CAR that specifically binds to a target antigen according to any of the CARs described herein and a CSR that specifically binds to a target ligand according to any of the CSRs described herein for the treatment of a patient having or at risk of developing a disease and/or disorder associated with expression of the target antigen (also referred to herein as a “target antigen-positive” or “TA-positive” disease or disorder), including, for example, cancer or viral infection, using lymphocyte infusion. In some embodiments, autologous lymphocyte infusion is used in the treatment. Autologous PBMCs are collected from a patient in need of treatment and T cells are activated and expanded using the methods described herein and known in the art and then infused back into the patient.

[0272] In some embodiments, there is provided a T cell expressing a CAR that specifically binds to a target antigen according to any of the CARs described herein and a CSR that specifically binds to a target ligand according to any of the CSRs described herein (also referred to herein as an “CAR plus CSR T cell”). The CAR plus CSR T cells of the invention can undergo robust in vivo T cell expansion and can establish target antigen-specific memory cells that persist at high levels for an extended amount of time in blood and bone marrow. In some embodiments, the CAR plus CSR T cells of the invention infused into a patient can eliminate target antigen-presenting cells, such as target antigen-presenting cancer or virally-infected cells, in vivo in patients having a target antigen-associated disease. In some embodiments, the CAR plus CSR T cells of the invention infused into a patient can eliminate target antigen-presenting cells, such as target antigen-presenting cancer or virally-infected cells, in vivo in patients having a target antigen-associated disease that is refractory to at least one conventional treatment.

[0273] Prior to expansion and genetic modification of the T cells, a source of T cells is obtained from a subject. T cells can be obtained from a number of sources, including peripheral blood mononuclear cells, bone marrow, lymph node tissue, cord blood, thymus tissue, tissue from a site of infection, ascites, pleural effusion, spleen tissue, and tumors. In some embodiments of the present invention, any number of T cell lines available in the art may be used. In some embodiments of the present invention, T cells can be obtained from a unit of blood collected from a subject using any number of techniques known to the skilled artisan, such as FICOLL™ separation. In some embodiments, cells from the circulating blood of an individual are obtained by apheresis. The apheresis product typically contains lymphocytes, including T cells, monocytes, granulocytes, B cells, other nucleated white blood cells, red blood cells, and platelets. In some embodiments, the cells collected by apheresis may be washed to remove the plasma fraction and to place the cells in an appropriate buffer or media for subsequent processing steps. In some embodiments, the cells are washed with phosphate buffered saline (PBS). In some embodiments, the wash solution lacks calcium and may lack magnesium or may lack many if not all divalent cations. As those of ordinary skill in the art would readily appreciate a washing step may be accomplished by methods known to those in the art, such as by using a semi-automated “flow-through” centrifuge (for example, the Cobe 2991 cell processor, the Baxter CytoMate, or the Haemonetics Cell Saver 5) according to the manufacturer's instructions. After washing, the cells may be resuspended in a variety of biocompatible buffers, such as Ca²⁺-free, Mg²⁺-free PBS, PlasmaLyte A, or other saline solutions with or without buffer. Alternatively, the undesirable components of the apheresis sample may be removed, and the cells directly resuspended in culture media.

[0274] In some embodiments, T cells are isolated from peripheral blood lymphocytes by lysing the red blood cells and depleting the monocytes, for example, by centrifugation through a PERCOLL™ gradient or by counterflow centrifugal elutriation. A specific subpopulation of T cells, such as CD3⁺, CD28⁺, CD4⁺, CD8⁺, CD45RA⁺, and CD45RO′ T cells, can be further isolated by positive or negative selection techniques. For example, in some embodiments, T cells are isolated by incubation with anti-CD3/anti-CD28 (i.e., 3×28)-conjugated beads, such as DYNABEADS® M-450 CD3/CD28 T, for a time period sufficient for positive selection of the desired T cells. In some embodiments, the time period is about 30 minutes. In some embodiments, the time period ranges from 30 minutes to 36 hours or longer (including all ranges between these values). In some embodiments, the time period is at least one, 2, 3, 4, 5, or 6 hours. In some embodiments, the time period is 10 to 24 hours. In some embodiments, the incubation time period is 24 hours. For isolation of T cells from patients with leukemia, use of longer incubation times, such as 24 hours, can increase cell yield. Longer incubation times may be used to isolate T cells in any situation where there are few T cells as compared to other cell types, such as in isolating tumor infiltrating lymphocytes (TIL) from tumor tissue or from immune-compromised individuals. Further, use of longer incubation times can increase the efficiency of capture of CD8⁺ T cells. Thus, by simply shortening or lengthening the time T cells are allowed to bind to the CD3/CD28 beads and/or by increasing or decreasing the ratio of beads to T cells, subpopulations of T cells can be preferentially selected for or against at culture initiation or at other time points during the process. Additionally, by increasing or decreasing the ratio of anti-CD3 and/or anti-CD28 antibodies on the beads or other surface, subpopulations of T cells can be preferentially selected for or against at culture initiation or at other desired time points. The skilled artisan would recognize that multiple rounds of selection can also be used in the context of this invention. In some embodiments, it may be desirable to perform the selection procedure and use the “unselected” cells in the activation and expansion process. “Unselected” cells can also be subjected to further rounds of selection.

[0275] Enrichment of a T cell population by negative selection can be accomplished with a combination of antibodies directed to surface markers unique to the negatively selected cells. One method is cell sorting and/or selection via negative magnetic immunoadherence or flow cytometry that uses a cocktail of monoclonal antibodies directed to cell surface markers present on the cells negatively selected. For example, to enrich for CD4⁺ cells by negative selection, a monoclonal antibody cocktail typically includes antibodies to CD14, CD20, CD11b, CD16, HLA-DR, and CD8. In some embodiments, it may be desirable to enrich for or positively select for regulatory T cells which typically express CD4⁺, CD25⁺, CD62Lhi, GITR⁺, and FoxP3⁺. Alternatively, in some embodiments, T regulatory cells are depleted by anti-CD25 conjugated beads or other similar methods of selection.

[0276] For isolation of a desired population of cells by positive or negative selection, the concentration of cells and surface (e.g., particles such as beads) can be varied. In some embodiments, it may be desirable to significantly decrease the volume in which beads and cells are mixed together (i.e., increase the concentration of cells), to ensure maximum contact of cells and beads. For example, in some embodiments, a concentration of about 2 billion cells/ml is used. In some embodiments, a concentration of about 1 billion cells/ml is used. In some embodiments, greater than about 100 million cells/ml is used. In some embodiments, a concentration of cells of about any of 10, 15, 20, 25, 30, 35, 40, 45, or 50 million cells/ml is used. In some embodiments, a concentration of cells of about any of 75, 80, 85, 90, 95, or 100 million cells/ml is used. In some embodiments, a concentration of about 125 or about 150 million cells/ml is used. Using high concentrations can result in increased cell yield, cell activation, and cell expansion. Further, use of high cell concentrations allows more efficient capture of cells that may weakly express target antigens of interest, such as CD28-negative T cells, or from samples where there are many tumor cells present (i.e., leukemic blood, tumor tissue, etc.). Such populations of cells may have therapeutic value and would be desirable to obtain. For example, using high concentration of cells allows more efficient selection of CD8⁺ T cells that normally have weaker CD28 expression.

[0277] In some embodiments of the present invention, T cells are obtained from a patient directly following treatment. In this regard, it has been observed that following certain cancer treatments, in particular treatments with drugs that damage the immune system, shortly after treatment during the period when patients would normally be recovering from the treatment, the quality of T cells obtained may be optimal or improved for their ability to expand ex vivo. Likewise, following ex vivo manipulation using the methods described herein, these cells may be in a preferred state for enhanced engraftment and in vivo expansion. Thus, it is contemplated within the context of the present invention to collect blood cells, including T cells, dendritic cells, or other cells of the hematopoietic lineage, during this recovery phase. Further, in some embodiments, mobilization (for example, mobilization with GM-CSF) and conditioning regimens can be used to create a condition in a subject wherein repopulation, recirculation, regeneration, and/or expansion of particular cell types is favored, especially during a defined window of time following therapy. Illustrative cell types include T cells, B cells, dendritic cells, and other cells of the immune system.

[0278] Whether prior to or after genetic modification of the T cells to express a desirable CAR, CSR and optionally SSE, the T cells can be activated and expanded generally using methods as described, for example, in U.S. Pat. Nos. 6,352,694; 6,534,055; 6,905,680; 6,692,964; 5,858,358; 6,887,466; 6,905,681; 7,144,575; 7,067,318; 7,172,869; 7,232,566; 7,175,843; 5,883,223; 6,905,874; 6,797,514; 6,867,041; and U.S. Patent Application Publication No. 20060121005.

[0279] Generally, the T cells of the invention are expanded by contact with a surface having attached thereto an agent that stimulates a CD3/TCR complex associated signal and a ligand that stimulates a co-stimulatory molecule on the surface of the T cells. In particular, T cell populations may be stimulated, such as by contact with an anti-CD3 antibody, or antigen-binding fragment thereof, or an anti-CD2 antibody immobilized on a surface, or by contact with a protein kinase C activator (e.g., bryostatin) in conjunction with a calcium ionophore. For co-stimulation of an accessory molecule on the surface of the T cells, a ligand that binds the accessory molecule is used. For example, a population of T cells can be contacted with an anti-CD3 antibody and an anti-CD28 antibody, under conditions appropriate for stimulating proliferation of the T cells. To stimulate proliferation of either CD4⁺ T cells or CD8⁺ T cells, an anti-CD3 antibody and an anti-CD28 antibody. Examples of an anti-CD28 antibody include 9.3, B-T3, XR-CD28 (Diaclone, Besangon, France) can be used as can other methods commonly known in the art (Berg et al., Transplant Proc. 30(8):3975-3977, 1998; Haanen et al., J. Exp. Med. 190(9):13191328, 1999; Garland et al., J. Immunol. Meth. 227(1-2):53-63, 1999).

[0280] XI. Genetic Modification

[0281] In some embodiments, the CAR plus CSR immune cells (such as CAR plus CSR T cells) of the invention are generated by transducing immune cells (such as T cells prepared by the methods described herein) with one or more viral vectors encoding a CAR as described herein and a CSR as described herein. Viral vector delivery systems include DNA and RNA viruses, which have either episomal or integrated genomes after delivery to the immune cell. For a review of gene therapy procedures, see Anderson, Science 256:808-813 (1992); Nabel & Feigner, TIBTECH 11:211-217 (1993); Mitani & Caskey, TIBTECH 11:162-166 (1993); Dillon, TIBTECH 11: 167-175 (1993); Miller, Nature 357:455-460 (1992); Van Brunt, Biotechnology 6(10): 1149-1154 (1988); Vigne, Restorative Neurology and Neuroscience 8:35-36 (1995); Kremer & Perricaudet, British Medical Bulletin 51(1):31-44 (1995); and Yu et al., Gene Therapy 1:13-26 (1994). In some embodiments, the CAR plus CSR immune cell comprises the one or more vectors integrated into the CAR plus CSR immune cell genome. In some embodiments, the one or more viral vectors are lentiviral vectors. In some embodiments, the CAR plus CSR immune cell is a CAR plus CSR T cell comprising the lentiviral vectors integrated into its genome.

[0282] In some embodiments, the CAR plus CSR immune cell is a T cell modified to block or decrease the expression of one or both of its endogenous TCR chains. For example, in some embodiments, the CAR plus CSR immune cell is an αβ T cell modified to block or decrease the expression of the TCR α and/or β chains, or the CAR plus CSR immune cell is a γδ T cell modified to block or decrease the expression of the TCR γ and/or δ chains. Modifications of cells to disrupt gene expression include any such techniques known in the art, including for example RNA interference (e.g., siRNA, shRNA, miRNA), gene editing (e.g., CRISPR- or TALEN-based gene knockout), and the like.

[0283] In some embodiments, CAR plus CSR T cells with reduced expression of one or both of the endogenous TCR chains of the T cell are generated using the CRISPR/Cas system. For a review of the CRISPR/Cas system of gene editing, see for example Jian W & Marraffini L A, Annu. Rev. Microbiol. 69, 2015; Hsu P D et al., Cell, 157(6):1262-1278, 2014; and O'Connell M R et al., Nature 516: 263-266, 2014. In some embodiments, CAR plus CSR T cells with reduced expression of one or both of the endogenous TCR chains of the T cell are generated using TALEN-based genome editing.

[0284] XIII. Enrichment

[0285] In some embodiments, there is provided a method of enriching a heterogeneous cell population for a CAR plus CSR immune cell according to any of the CAR plus CSR immune cells described herein.

[0286] A specific subpopulation of CAR plus CSR immune cells (such as CAR plus CSR T cells) that specifically bind to a target antigen and target ligand can be enriched for by positive selection techniques. For example, in some embodiments, CAR plus CSR immune cells (such as CAR plus CSR T cells) are enriched for by incubation with target antigen-conjugated beads and/or target ligand-conjugated beads for a time period sufficient for positive selection of the desired CAR plus CSR immune cells. In some embodiments, the time period is about 30 minutes. In some embodiments, the time period ranges from 30 minutes to 36 hours or longer (including all ranges between these values). In some embodiments, the time period is at least one, 2, 3, 4, 5, or 6 hours. In some embodiments, the time period is 10 to 24 hours. In some embodiments, the incubation time period is 24 hours. For isolation of CAR plus CSR immune cells present at low levels in the heterogeneous cell population, use of longer incubation times, such as 24 hours, can increase cell yield. Longer incubation times may be used to isolate CAR plus CSR immune cells in any situation where there are few CAR plus CSR immune cells as compared to other cell types. The skilled artisan would recognize that multiple rounds of selection can also be used in the context of this invention.

[0287] For isolation of a desired population of CAR plus CSR immune cells by positive selection, the concentration of cells and surface (e.g., particles such as beads) can be varied. In some embodiments, it may be desirable to significantly decrease the volume in which beads and cells are mixed together (i.e., increase the concentration of cells), to ensure maximum contact of cells and beads. For example, in some embodiments, a concentration of about 2 billion cells/ml is used. In some embodiments, a concentration of about 1 billion cells/ml is used. In some embodiments, greater than about 100 million cells/ml is used. In some embodiments, a concentration of cells of about any of 10, 15, 20, 25, 30, 35, 40, 45, or 50 million cells/ml is used. In some embodiments, a concentration of cells of about any of 75, 80, 85, 90, 95, or 100 million cells/ml is used. In some embodiments, a concentration of about 125 or about 150 million cells/ml is used. Using high concentrations can result in increased cell yield, cell activation, and cell expansion. Further, use of high cell concentrations allows more efficient capture of CAR plus CSR immune cells that may weakly express the CAR and/or CSR.

[0288] In some of any such embodiments described herein, enrichment results in minimal or substantially no exhaustion of the CAR plus CSR immune cells. For example, in some embodiments, enrichment results in fewer than about 50% (such as fewer than about any of 45, 40, 35, 30, 25, 20, 15, 10, or 5%) of the CAR plus CSR immune cells becoming exhausted. Immune cell exhaustion can be determined by any means known in the art, including any means described herein.

[0289] In some of any such embodiments described herein, enrichment results in minimal or substantially no terminal differentiation of the CAR plus CSR immune cells. For example, in some embodiments, enrichment results in fewer than about 50% (such as fewer than about any of 45, 40, 35, 30, 25, 20, 15, 10, or 5%) of the CAR plus CSR immune cells becoming terminally differentiated. Immune cell differentiation can be determined by any means known in the art, including any means described herein.

[0290] In some of any such embodiments described herein, enrichment results in minimal or substantially no internalization of CARs and/or CSRs on the CAR plus CSR immune cells. For example, in some embodiments, enrichment results in less than about 50% (such as less than about any of 45, 40, 35, 30, 25, 20, 15, 10, or 5%) of CARs and/or CSRs on the CAR plus CSR immune cells becoming internalized. Internalization of CARs and/or CSRs on CAR plus CSR immune cells can be determined by any means known in the art, including any means described herein.

[0291] In some of any such embodiments described herein, enrichment results in increased proliferation of the CAR plus CSR immune cells. For example, in some embodiments, enrichment results in an increase of at least about 10% (such as at least about any of 20, 30, 40, 50, 60, 70, 80, 90, 100, 200, 300, 400, 500, 1000% or more) in the number of CAR plus CSR immune cells following enrichment.

[0292] Thus, in some embodiments, there is provided a method of enriching a heterogeneous cell population for CAR plus CSR immune cells expressing a CAR that specifically binds to a target antigen and a CSR that specifically binds to a target ligand comprising: a) contacting the heterogeneous cell population with a first molecule comprising the target antigen or one or more epitopes contained therein and/or a second molecule comprising the target ligand or one or more epitopes contained therein to form complexes comprising the CAR plus CSR immune cell bound to the first molecule and/or complexes comprising the CAR plus CSR immune cell bound to the second molecule; and b) separating the complexes from the heterogeneous cell population, thereby generating a cell population enriched for the CAR plus CSR immune cells. In some embodiments, the first and/or second molecules are immobilized, individually, to a solid support. In some embodiments, the solid support is particulate (such as beads). In some embodiments, the solid support is a surface (such as the bottom of a well). In some embodiments, the first and/or second molecules are labelled, individually, with a tag. In some embodiments, the tag is a fluorescent molecule, an affinity tag, or a magnetic tag. In some embodiments, the method further comprises eluting the CAR plus CSR immune cells from the first and/or second molecules and recovering the eluate.

[0293] XIV. Effector Cell Therapy

[0294] The present application also provides methods of using immune cells as described herein to redirect the specificity of an effector cell (such as a primary T cell) to a cancer cell. Thus, the present invention also provides a method of stimulating an effector cell-mediated response (such as a T cell-mediated immune response) to a target cell population or tissue comprising cancer cells in a mammal, comprising the step of administering to the mammal an effector cell (such as a T cell) that expresses a CAR and a CSR as described herein. In some embodiments, “stimulating” an immune cell refers to eliciting an effector cell-mediated response (such as a T cell-mediated immune response), which is different from activating an immune cell.

[0295] Effector cells (such as T cells) expressing a CAR and a CSR as described herein can be infused to a recipient in need thereof. The infused cell is able to kill cancer cells in the recipient. In some embodiments, unlike antibody therapies, effector cells (such as T cells) are able to replicate in vivo resulting in long-term persistence that can lead to sustained tumor control.

[0296] In some embodiments, the effector cells are T cells that can undergo robust in vivo T cell expansion and can persist for an extended amount of time. In some embodiments, the T cells of the invention develop into specific memory T cells that can be reactivated to inhibit any additional tumor formation or growth.

[0297] The effector cells (such as T cells) of the invention may also serve as a type of vaccine for ex vivo immunization and/or in vivo therapy in a mammal. In some embodiments, the mammal is a human.

[0298] With respect to ex vivo immunization, at least one of the following occurs in vitro prior to administering the cell into a mammal: i) expansion of the cells, ii) introducing nucleic acid(s) encoding a CAR and a CSR to the cells, and/or iii) cryopreservation of the cells. Ex vivo procedures are well-known in the art. Briefly, cells are isolated from a mammal (preferably a human) and genetically modified (i.e., transduced or transfected in vitro) with vector(s) expressing a CAR and a CSR disclosed herein. The cell can be administered to a mammalian recipient to provide a therapeutic benefit. The mammalian recipient may be a human and the cell can be autologous with respect to the recipient. Alternatively, the cells can be allogeneic, syngeneic or xenogeneic with respect to the recipient. The procedure for ex vivo expansion of hematopoietic stem and progenitor cells is described in U.S. Pat. No. 5,199,942, incorporated herein by reference, can be applied to the cells of the present invention. Other suitable methods are known in the art; therefore, the present invention is not limited to any particular method of ex vivo expansion of the cells. Briefly, ex vivo culture and expansion of T cells comprises: (1) collecting T cells from peripheral blood mononuclear cells (PBMC); and (2) expanding such cells ex vivo. In addition to the cellular growth factors described in U.S. Pat. No. 5,199,942, other factors such as flt3-L, IL-1, IL-3 and c-kit ligand, can be used for culturing and expansion of the cells.

[0299] In addition to using a cell-based vaccine in terms of ex vivo immunization, the present invention also provides compositions and methods for in vivo immunization to elicit an immune response directed against an antigen in a patient. The effector cells (such as T cells) of the present invention may be administered either alone, or as a pharmaceutical composition in combination with diluents and/or with other components such as IL-2 or other cytokines or cell populations. Briefly, pharmaceutical compositions of the present invention may comprise effector cells (such as T cells), in combination with one or more pharmaceutically or physiologically acceptable carriers, diluents or excipients. Such compositions may comprise buffers such as neutral buffered saline, phosphate buffered saline and the like; carbohydrates such as glucose, mannose, sucrose or dextrans, mannitol; proteins; polypeptides or amino acids such as glycine; antioxidants; chelating agents such as EDTA or glutathione; adjuvants (e.g., aluminum hydroxide); and preservatives. In some embodiments, effector cell (such as T cell) compositions are formulated for administration by intravenous, intrathecal, intracranial, intracerebral, or intracerebroventricular route.

[0300] The precise amount of the effector cell (such as CAR T cell) compositions of the present invention to be administered can be determined by a physician with consideration of individual differences in age, weight, tumor size, extent of infection or metastasis, and condition of the patient (subject). In some embodiments, a pharmaceutical composition comprising the effector cells (such as T cells) is administered at a dosage of about 10⁴ to about 10⁹ cells/kg body weight, such any of about 10⁴ to about 10⁵, about 10⁵ to about 10⁶, about 10⁶ to about 10⁷, about 10⁷ to about 10⁸, or about 10⁸ to about 10⁹ cells/kg body weight, including all integer values within those ranges. Effect cell (such as T cell) compositions may also be administered multiple times at these dosages. The cells can be administered by using infusion techniques that are commonly known in immunotherapy (see, e.g., Rosenberg et al., New Eng. J. of Med. 319:1676, 1988). The optimal dosage and treatment regimen for a particular patient can readily be determined by one skilled in the art of medicine by monitoring the patient for signs of disease and adjusting the treatment accordingly.

[0301] In some embodiments, it may be desired to administer activated effector cells (such as T cells) to a subject and then subsequently redraw blood (or have an apheresis performed), activate T cells therefrom according to the present invention, and reinfuse the patient with these activated and expanded T cells. This process can be carried out multiple times every few weeks. In some embodiments, T cells can be activated from blood draws of from 10 cc to 400 cc. In some embodiments, T cells are activated from blood draws of 20 cc, 30 cc, 40 cc, 50 cc, 60 cc, 70 cc, 80 cc, 90 cc, or 100 cc.

[0302] The administration of the effector cells (such as T cells) may be carried out in any convenient manner, including by injection, ingestion, transfusion, implantation or transplantation. The compositions described herein may be administered to a patient subcutaneously, intradermally, intratumorally, intranodally, intramedullary, intramuscularly, intrathecally, intracranially, intracerebrally, intracerebroventricularly, by intravenous (i.v.) injection, or intraperitoneally. In some embodiments, the effector cell (such as T cell) compositions of the present invention are administered to a patient by intradermal or subcutaneous injection. In some embodiments, the effector cell (such as T cell) compositions of the present invention are administered by i.v. injection. In some embodiments, the effector cell (such as T cell) compositions of the present invention are administered by intrathecal injection. In some embodiments, the effector cell (such as T cell) compositions of the present invention are administered by intracranial injection. In some embodiments, the effector cell (such as T cell) compositions of the present invention are administered by intracerebral injection. In some embodiments, the effector cell (such as T cell) compositions of the present invention are administered by intracerebroventricular injection. The compositions of effector cell (such as T cell) may be injected directly into a tumor, lymph node, or site of infection.

[0303] XV. Methods of Diagnosis and Imaging Using CARs and CSRs

[0304] Labeled CARs and CSRs can be used for diagnostic purposes to detect, diagnose, or monitor a cancer. For example, the CARs and CSRs described herein can be used in in situ, in vivo, ex vivo, and in vitro diagnostic assays or imaging assays.

[0305] Additional embodiments of the invention include methods of diagnosing a cancer (e.g., a hematological cancer or a solid tumor cancer) in an individual (e.g., a mammal such as a human). The methods comprise detecting antigen-presenting cells in the individual. In some embodiments, there is provided a method of diagnosing a cancer (e.g., a hematological cancer or a solid tumor cancer) in an individual (e.g., a mammal, such as a human) comprising (a) administering an effective amount of a labeled antibody moiety according to any of the embodiments described above to the individual; and (b) determining the level of the label in the individual, such that a level of the label above a threshold level indicates that the individual has the cancer. The threshold level can be determined by various methods, including, for example, by detecting the label according to the method of diagnosing described above in a first set of individuals that have the cancer and a second set of individuals that do not have the cancer, and setting the threshold to a level that allows for discrimination between the first and second sets. In some embodiments, the threshold level is zero, and the method comprises determining the presence or absence of the label in the individual. In some embodiments, the method further comprises waiting for a time interval following the administering of step (a) to permit the labeled antibody moiety to preferentially concentrate at sites in the individual where the antigen is expressed (and for unbound labeled antibody moiety to be cleared). In some embodiments, the method further comprises subtracting a background level of the label. Background level can be determined by various methods, including, for example, by detecting the label in the individual prior to administration of the labeled antibody moiety, or by detecting the label according to the method of diagnosing described above in an individual that does not have the cancer.

[0306] Antibody moieties of the invention can be used to assay levels of antigen-presenting cell in a biological sample using methods known to those of skill in the art. Suitable antibody labels are known in the art and include enzyme labels, such as, glucose oxidase; radioisotopes, such as iodine (131I, 125I, 123I, 121I), carbon (14C), sulfur (35S), tritium (3H), indium (115mIn, 113mIn, 112In, 111In), technetium (99Tc, 99mTc), thallium (201Ti), gallium (68Ga, 67Ga), palladium (103Pd), molybdenum (99Mo), xenon (133Xe), fluorine (18F), samarium (153Sm), lutetium (177Lu), gadolinium (159Gd), promethium (149Pm), lanthanum (140La), ytterbium (175Yb), holmium (166Ho), yttrium (90Y), scandium (47Sc), rhenium (186Re, 188Re), praseodymium (142Pr), rhodium (105Rh), and ruthenium (97Ru); luminol; fluorescent labels, such as fluorescein and rhodamine; and biotin.

[0307] Techniques known in the art may be applied to labeled antibody moieties of the invention. Such techniques include, but are not limited to, the use of bifunctional conjugating agents (see e.g., U.S. Pat. Nos. 5,756,065; 5,714,631; 5,696,239; 5,652,361; 5,505,931; 5,489,425; 5,435,990; 5,428,139; 5,342,604; 5,274,119; 4,994,560; and 5,808,003). Aside from the above assays, various in vivo and ex vivo assays are available to the skilled practitioner. For example, one can expose cells within the body of the subject to an antibody moiety which is optionally labeled with a detectable label, e.g., a radioactive isotope, and binding of the antibody moiety to the cells can be evaluated, e.g., by external scanning for radioactivity or by analyzing a sample (e.g., a biopsy or other biological sample) derived from a subject previously exposed to the antibody moiety.

[0308] XVI. Pharmaceutical Compositions

[0309] Also provided herein are CAR plus CSR immune cell compositions (such as pharmaceutical compositions, also referred to herein as formulations) comprising an immune cell (such as a T cell) presenting on its surface a CAR according to any of the CARs described herein and a CSR according to any of the CSRs described herein. In some embodiments, the CAR plus CSR immune cell composition is a pharmaceutical composition.

[0310] The composition may comprise a homogenous cell population comprising CAR plus CSR immune cells of the same cell type and expressing the same CAR and CSR, or a heterogeneous cell population comprising a plurality of CAR plus CSR immune cell populations comprising CAR plus CSR immune cells of different cell types, expressing different CARs, and/or expressing different CSRs. The composition may further comprise cells that are not CAR plus CSR immune cells.

[0311] Thus, in some embodiments, there is provided a CAR plus CSR immune cell composition comprising a homogeneous cell population of CAR plus CSR immune cells (such as CAR plus CSR T cells) of the same cell type and expressing the same CAR and CSR. In some embodiments, the CAR plus CSR immune cell is a T cell. In some embodiments, the CAR plus CSR immune cell is selected from the group consisting of a cytotoxic T cell, a helper T cell, a natural killer T cell, and a suppressor T cell. In some embodiments, the CAR plus CSR immune cell composition is a pharmaceutical composition.

[0312] In some embodiments, there is provided a CAR plus CSR immune cell composition comprising a heterogeneous cell population comprising a plurality of CAR plus CSR immune cell populations comprising CAR plus CSR immune cells of different cell types, expressing different CARs, and/or expressing different CSRs. In some embodiments, the CAR plus CSR immune cells are T cells. In some embodiments, each population of CAR plus CSR immune cells is, independently from one another, of a cell type selected from the group consisting of cytotoxic T cells, helper T cells, natural killer T cells, and suppressor T cells. In some embodiments, all of the CAR plus CSR immune cells in the composition are of the same cell type (e.g., all of the CAR plus CSR immune cells are cytotoxic T cells). In some embodiments, at least one population of CAR plus CSR immune cells is of a different cell type than the others (e.g., one population of CAR plus CSR immune cells consists of cytotoxic T cells and the other populations of CAR plus CSR immune cells consist of natural killer T cells). In some embodiments, each population of CAR plus CSR immune cells expresses the same CAR. In some embodiments, at least one population of CAR plus CSR immune cells expresses a different CAR than the others. In some embodiments, each population of CAR plus CSR immune cells expresses a different CAR than the others. In some embodiments, each population of CAR plus CSR immune cells expresses a CAR that specifically binds to the same target antigen. In some embodiments, at least one population of CAR plus CSR immune cells expresses a CAR that specifically binds to a different target antigen than the others (e.g., one population of CAR plus CSR immune cells specifically binds to a pMHC complex and the other populations of CAR plus CSR immune cells specifically bind to a cell surface receptor). In some embodiments, where at least one population of CAR plus CSR immune cells expresses a CAR that specifically binds to a different target antigen, each population of CAR plus CSR immune cells expresses a CAR that specifically binds to a target antigen associated with the same disease or disorder (e.g., each of the target antigens are associated with a cancer, such as breast cancer). In some embodiments, each population of CAR plus CSR immune cells expresses the same CSR. In some embodiments, at least one population of CAR plus CSR immune cells expresses a different CSR than the others. In some embodiments, each population of CAR plus CSR immune cells expresses a different CSR than the others. In some embodiments, each population of CAR plus CSR immune cells expresses a CSR that specifically binds to the same target ligand. In some embodiments, at least one population of CAR plus CSR immune cells expresses a CSR that specifically binds to a different target ligand than the others (e.g., one population of CAR plus CSR immune cells specifically binds to a pNMC complex and the other populations of CAR plus CSR immune cells specifically bind to a cell surface receptor). In some embodiments, where at least one population of CAR plus CSR immune cells expresses a CSR that specifically binds to a different target ligand, each population of CAR plus CSR immune cells expresses a CSR that specifically binds to a target ligand associated with the same disease or disorder (e.g., each of the target ligands are associated with a cancer, such as breast cancer). In some embodiments, the CAR plus CSR immune cell composition is a pharmaceutical composition.

[0313] Thus, in some embodiments, there is provided a CAR plus CSR immune cell composition comprising a plurality of CAR plus CSR immune cell populations according to any of the embodiments described herein, wherein all of the CAR plus CSR immune cells in the composition are of the same cell type (e.g., all of the CAR plus CSR immune cells are cytotoxic T cells), and wherein each population of CAR plus CSR immune cells expresses a different CAR than the others. In some embodiments, the CAR plus CSR immune cells are T cells. In some embodiments, the CAR plus CSR immune cells are selected from the group consisting of cytotoxic T cells, helper T cells, natural killer T cells, and suppressor T cells. In some embodiments, each population of CAR plus CSR immune cells expresses a CAR that specifically binds to the same target antigen. In some embodiments, at least one population of CAR plus CSR immune cells expresses a CAR that specifically binds to a different target antigen than the others (e.g., one population of CAR plus CSR immune cells specifically binds to a pMHC complex and the other populations of CAR plus CSR immune cells specifically bind to a cell surface receptor). In some embodiments, where at least one population of CAR plus CSR immune cells expresses a CAR that specifically binds to a different target antigen, each population of CAR plus CSR immune cells expresses a CAR that specifically binds to a target antigen associated with the same disease or disorder (e.g., each of the target antigens are associated with a cancer, such as breast cancer). In some embodiments, the CAR plus CSR immune cell composition is a pharmaceutical composition.

[0314] In some embodiments, there is provided a CAR plus CSR immune cell composition comprising a plurality of CAR plus CSR immune cell populations according to any of the embodiments described herein, wherein all of the CAR plus CSR immune cells in the composition are of the same cell type (e.g., all of the CAR plus CSR immune cells are cytotoxic T cells), and wherein each population of CAR plus CSR immune cells expresses a different CSR than the others. In some embodiments, the CAR plus CSR immune cells are T cells. In some embodiments, the CAR plus CSR immune cells are selected from the group consisting of cytotoxic T cells, helper T cells, natural killer T cells, and suppressor T cells. In some embodiments, each population of CAR plus CSR immune cells expresses a CSR that specifically binds to the same target ligand. In some embodiments, at least one population of CAR plus CSR immune cells expresses a CSR that specifically binds to a different target ligand than the others (e.g., one population of CAR plus CSR immune cells specifically binds to a pMHC complex and the other populations of CAR plus CSR immune cells specifically bind to a cell surface receptor). In some embodiments, where at least one population of CAR plus CSR immune cells expresses a CSR that specifically binds to a different target ligand, each population of CAR plus CSR immune cells expresses a CSR that specifically binds to a target ligand associated with the same disease or disorder (e.g., each of the target ligands are associated with a cancer, such as breast cancer). In some embodiments, the CAR plus CSR immune cell composition is a pharmaceutical composition.

[0315] In some embodiments, there is provided a composition comprising a plurality of CAR plus CSR immune cell populations according to any of the embodiments described herein, wherein at least one population of CAR plus CSR immune cells is of a different cell type than the others. In some embodiments, all of the populations of CAR plus CSR immune cells are of different cell types. In some embodiments, the CAR plus CSR immune cells are T cells. In some embodiments, each population of CAR plus CSR immune cells is, independently from one another, of a cell type selected from the group consisting of cytotoxic T cells, helper T cells, natural killer T cells, and suppressor T cells. In some embodiments, each population of CAR plus CSR immune cells expresses the same CAR. In some embodiments, at least one population of CAR plus CSR immune cells expresses a different CAR than the others. In some embodiments, each population of CAR plus CSR immune cells expresses a different CAR than the others. In some embodiments, each population of CAR plus CSR immune cells expresses a CAR that specifically binds to the same target antigen. In some embodiments, at least one population of CAR plus CSR immune cells expresses a CAR that specifically binds to a different target antigen than the others (e.g., one population of CAR plus CSR immune cells specifically binds to a pMHC complex and the other populations of CAR plus CSR immune cells specifically bind to a cell surface receptor). In some embodiments, where at least one population of CAR plus CSR immune cells expresses a CAR that specifically binds to a different target antigen, each population of CAR plus CSR immune cells expresses a CAR that specifically binds to a target antigen associated with the same disease or disorder (e.g., each of the target antigens are associated with a cancer, such as breast cancer). In some embodiments, each population of CAR plus CSR immune cells expresses the same CSR. In some embodiments, at least one population of CAR plus CSR immune cells expresses a different CSR than the others. In some embodiments, each population of CAR plus CSR immune cells expresses a different CSR than the others. In some embodiments, each population of CAR plus CSR immune cells expresses a CSR that specifically binds to the same target ligand. In some embodiments, at least one population of CAR plus CSR immune cells expresses a CSR that specifically binds to a different target ligand than the others (e.g., one population of CAR plus CSR immune cells specifically binds to a pMHC complex and the other populations of CAR plus CSR immune cells specifically bind to a cell surface receptor). In some embodiments, where at least one population of CAR plus CSR immune cells expresses a CSR that specifically binds to a different target ligand, each population of CAR plus CSR immune cells expresses a CSR that specifically binds to a target ligand associated with the same disease or disorder (e.g., each of the target ligands are associated with a cancer, such as breast cancer). In some embodiments, the CAR plus CSR immune cell composition is a pharmaceutical composition.

[0316] At various points during preparation of a composition, it can be necessary or beneficial to cryopreserve a cell. The terms “frozen/freezing” and “cryopreserved/cryopreserving” can be used interchangeably. Freezing includes freeze drying.

[0317] As is understood by one of ordinary skill in the art, the freezing of cells can be destructive (see Mazur, P., 1977, Cryobiology 14:251-272) but there are numerous procedures available to prevent such damage. For example, damage can be avoided by (a) use of a cryoprotective agent, (b) control of the freezing rate, and/or (c) storage at a temperature sufficiently low to minimize degradative reactions. Exemplary cryoprotective agents include dimethyl sulfoxide (DMSO) (Lovelock and Bishop, 1959, Nature 183:1394-1395; Ashwood-Smith, 1961, Nature 190:1204-1205), glycerol, polyvinylpyrrolidine (Rinfret, 1960, Ann. N.Y. Acad. Sci. 85:576), polyethylene glycol (Sloviter and Ravdin, 1962, Nature 196:548), albumin, dextran, sucrose, ethylene glycol, i-erythritol, D-ribitol, D-mannitol (Rowe et al., 1962, Fed. Proc. 21:157), D-sorbitol, i-inositol, D-lactose, choline chloride (Bender et al., 1960, J. Appl. Physiol. 15:520), amino acids (Phan The Tran and Bender, 1960, Exp. Cell Res. 20:651), methanol, acetamide, glycerol monoacetate (Lovelock, 1954, Biochem. J. 56:265), and inorganic salts (Phan The Tran and Bender, 1960, Proc. Soc. Exp. Biol. Med. 104:388; Phan The Tran and Bender, 1961, in Radiobiology, Proceedings of the Third Australian Conference on Radiobiology, Ilbery ed., Butterworth, London, p. 59). In particular embodiments, DMSO can be used. Addition of plasma (e.g., to a concentration of 20-25%) can augment the protective effects of DMSO. After addition of DMSO, cells can be kept at 0° C. until freezing, because DMSO concentrations of 1% can be toxic at temperatures above 4° C.

[0318] In the cryopreservation of cells, slow controlled cooling rates can be critical and different cryoprotective agents (Rapatz et al., 1968, Cryobiology 5(1): 18-25) and different cell types have different optimal cooling rates (see e.g., Rowe and Rinfret, 1962, Blood 20:636; Rowe, 1966, Cryobiology 3(1):12-18; Lewis, et al., 1967, Transfusion 7(1):17-32; and Mazur, 1970, Science 168:939-949 for effects of cooling velocity on survival of stem cells and on their transplantation potential). The heat of fusion phase where water turns to ice should be minimal. The cooling procedure can be carried out by use of, e.g., a programmable freezing device or a methanol bath procedure. Programmable freezing apparatuses allow determination of optimal cooling rates and facilitate standard reproducible cooling.

[0319] In particular embodiments, DMSO-treated cells can be pre-cooled on ice and transferred to a tray containing chilled methanol which is placed, in turn, in a mechanical refrigerator (e.g., Harris or Revco) at −80° C. Thermocouple measurements of the methanol bath and the samples indicate a cooling rate of 1° to 3° C./minute can be preferred. After at least two hours, the specimens can have reached a temperature of −80° C. and can be placed directly into liquid nitrogen (−196° C.).

[0320] After thorough freezing, the cells can be rapidly transferred to a long-term cryogenic storage vessel. In a preferred embodiment, samples can be cryogenically stored in liquid nitrogen (−196° C.) or vapor (−1° C.). Such storage is facilitated by the availability of highly efficient liquid nitrogen refrigerators.

[0321] Further considerations and procedures for the manipulation, cryopreservation, and long-term storage of cells, can be found in the following exemplary references: U.S. Pat. Nos. 4,199,022; 3,753,357; and 4,559,298; Gorin, 1986, Clinics In Haematology 15(1):19-48; Bone-Marrow Conservation, Culture and Transplantation, Proceedings of a Panel, Moscow, Jul. 22-26, 1968, International Atomic Energy Agency, Vienna, pp. 107-186; Livesey and Linner, 1987, Nature 327:255; Linner et al., 1986, J. Histochem. Cytochem. 34(9):1123-1135; Simione, 1992, J. Parenter. Sci. Technol. 46(6):226-32).

[0322] Following cryopreservation, frozen cells can be thawed for use in accordance with methods known to those of ordinary skill in the art. Frozen cells are preferably thawed quickly and chilled immediately upon thawing. In particular embodiments, the vial containing the frozen cells can be immersed up to its neck in a warm water bath; gentle rotation will ensure mixing of the cell suspension as it thaws and increase heat transfer from the warm water to the internal ice mass. As soon as the ice has completely melted, the vial can be immediately placed on ice.

[0323] In particular embodiments, methods can be used to prevent cellular clumping during thawing. Exemplary methods include: the addition before and/or after freezing of DNase (Spitzer et al., 1980, Cancer 45:3075-3085), low molecular weight dextran and citrate, hydroxyethyl starch (Stiff et al., 1983, Cryobiology 20:17-24), etc. [0162] As is understood by one of ordinary skill in the art, if a cryoprotective agent that is toxic to humans is used, it should be removed prior to therapeutic use. DMSO has no serious toxicity.

[0324] Exemplary carriers and modes of administration of cells are described at pages 14-15 of U.S. Patent Publication No. 2010/0183564. Additional pharmaceutical carriers are described in Remington: The Science and Practice of Pharmacy, 21 st Edition, David B. Troy, ed., Lippicott Williams & Wilkins (2005).

[0325] In particular embodiments, cells can be harvested from a culture medium, and washed and concentrated into a carrier in a therapeutically-effective amount. Exemplary carriers include saline, buffered saline, physiological saline, water, Hanks' solution, Ringer's solution, Nonnosol-R (Abbott Labs), Plasma-Lyte A® (Baxter Laboratories, Inc., Morton Grove, Ill.), glycerol, ethanol, and combinations thereof.

[0326] In particular embodiments, carriers can be supplemented with human serum albumin (HSA) or other human serum components or fetal bovine serum. In particular embodiments, a carrier for infusion includes buffered saline with 5% HAS or dextrose. Additional isotonic agents include polyhydric sugar alcohols including trihydric or higher sugar alcohols, such as glycerin, erythritol, arabitol, xylitol, sorbitol, or mannitol.

[0327] Carriers can include buffering agents, such as citrate buffers, succinate buffers, tartrate buffers, fumarate buffers, gluconate buffers, oxalate buffers, lactate buffers, acetate buffers, phosphate buffers, histidine buffers, and/or trimethylamine salts.

[0328] Stabilizers refer to a broad category of excipients which can range in function from a bulking agent to an additive which helps to prevent cell adherence to container walls. Typical stabilizers can include polyhydric sugar alcohols; amino acids, such as arginine, lysine, glycine, glutamine, asparagine, histidine, alanine, ornithine, L-leucine, 2-phenylalanine, glutamic acid, and threonine; organic sugars or sugar alcohols, such as lactose, trehalose, stachyose, mannitol, sorbitol, xylitol, ribitol, myoinisitol, galactitol, glycerol, and cyclitols, such as inositol; PEG; amino acid polymers; sulfur-containing reducing agents, such as urea, glutathione, thioctic acid, sodium thioglycolate, thioglycerol, alpha-monothioglycerol, and sodium thiosulfate; low molecular weight polypeptides (i.e., <10 residues); proteins such as HSA, bovine serum albumin, gelatin or immunoglobulins; hydrophilic polymers such as polyvinylpyrrolidone; monosaccharides such as xylose, mannose, fructose and glucose; disaccharides such as lactose, maltose and sucrose; trisaccharides such as raffinose, and polysaccharides such as dextran.

[0329] Where necessary or beneficial, compositions can include a local anesthetic such as lidocaine to ease pain at a site of injection.

[0330] Exemplary preservatives include phenol, benzyl alcohol, meta-cresol, methyl paraben, propyl paraben, octadecyldimethylbenzyl ammonium chloride, benzalkonium halides, hexamethonium chloride, alkyl parabens such as methyl or propyl paraben, catechol, resorcinol, cyclohexanol, and 3-pentanol.

[0331] Therapeutically effective amounts of cells within compositions can be greater than 10² cells, greater than 10³ cells, greater than 10⁴ cells, greater than 10⁵ cells, greater than 10⁶ cells, greater than 10⁷ cells, greater than 10⁸ cells, greater than 10⁹ cells, greater than 10¹⁰ cells, or greater than 10¹¹ cells.

[0332] In compositions and formulations disclosed herein, cells are generally in a volume of a liter or less, 500 ml or less, 250 ml or less or 100 ml or less. Hence the density of administered cells is typically greater than 10⁴ cells/ml, 10⁷ cells/ml or 10⁸ cells/ml.

[0333] Also provided herein are nucleic acid compositions (such as pharmaceutical compositions, also referred to herein as formulations) comprising any of the nucleic acids encoding a CAR and/or CSR and/or SSE described herein. In some embodiments, the nucleic acid composition is a pharmaceutical composition. In some embodiments, the nucleic acid composition further comprises any of an isotonizing agent, an excipient, a diluent, a thickener, a stabilizer, a buffer, and/or a preservative; and/or an aqueous vehicle, such as purified water, an aqueous sugar solution, a buffer solution, physiological saline, an aqueous polymer solution, or RNase free water. The amounts of such additives and aqueous vehicles to be added can be suitably selected according to the form of use of the nucleic acid composition.

[0334] The compositions and formulations disclosed herein can be prepared for administration by, for example, injection, infusion, perfusion, or lavage. The compositions and formulations can further be formulated for bone marrow, intravenous, intradermal, intraarterial, intranodal, intralymphatic, intraperitoneal, intralesional, intraprostatic, intravaginal, intrarectal, topical, intrathecal, intratumoral, intramuscular, intravesicular, and/or subcutaneous injection.

[0335] The formulations to be used for in vivo administration must be sterile. This is readily accomplished by, e.g., filtration through sterile filtration membranes.

[0336] XVII. Dosage and Administration

[0337] The dose of the compositions administered to an individual (such as a human) may vary with the particular composition, the mode of administration, and the type of disease being treated. In some embodiments, the amount of the composition is sufficient to result in a complete response in the individual. In some embodiments, the amount of the composition is sufficient to result in a partial response in the individual. In some embodiments, the amount of the composition administered (for example when administered alone) is sufficient to produce an overall response rate of more than about any of 2%, 4%, 6%, 8%, 10%, 15%, 20%, 25%, 30%, 35%, 40%, 45%, 50%, 55%, 60%, 64%, 65%, 70%, 75%, 80%, 85%, or 90% among a population of individuals treated with the composition. Responses of an individual to the treatment of the methods described herein can be determined, for example, based on the percentage tumor growth inhibition (% TGI).

[0338] In some embodiments, the amount of the composition is sufficient to prolong overall survival of the individual. In some embodiments, the amount of the composition (for example when administered along) is sufficient to produce clinical benefit of more than about any of 2%, 4%, 6%, 8%, 10%, 15%, 20%, 25%, 30%, 35%, 40%, 45%, 50%, 60%, 70%, or 77% among a population of individuals treated with the composition.

[0339] In some embodiments, the amount of the composition is an amount sufficient to decrease the size of a tumor, decrease the number of cancer cells, or decrease the growth rate of a tumor by at least about any of 2%, 4%, 6%, 8%, 10%, 20%, 30%, 40%, 50%, 60%, 70%, 80%, 90%, 95% or 100% compared to the corresponding tumor size, number of cancer cells, or tumor growth rate in the same subject prior to treatment or compared to the corresponding activity in other subjects not receiving the treatment. Standard methods can be used to measure the magnitude of this effect, such as in vitro assays with purified enzyme, cell-based assays, animal models, or human testing.

[0340] In some embodiments, the amount of the composition is below the level that induces a toxicological effect (i.e., an effect above a clinically acceptable level of toxicity) or is at a level where a potential side effect can be controlled or tolerated when the composition is administered to the individual. In some embodiments, the amount of the composition is close to a maximum tolerated dose (MTD) of the composition following the same dosing regimen. In some embodiments, the amount of the composition is more than about any of 80%, 90%, 95%, or 98% of the MTD. In some embodiments, the amount of the composition is included in a range of about 0.001 μg to about 1000 μg. In some embodiments of any of the above aspects, the effective amount of the composition is in the range of about 0.1 μg/kg to about 100 mg/kg of total body weight.

[0341] The compositions can be administered to an individual (such as human) via various routes, including, for example, intravenous, intra-arterial, intraperitoneal, intrapulmonary, oral, nasal, inhalation, intravesicular, intramuscular, intra-tracheal, subcutaneous, intraocular, intrathecal, intracranial, intracerebral, intracerebroventricular, transmucosal, and transdermal. In some embodiments, sustained continuous release formulation of the composition may be used. In some embodiments, the composition is administered intravenously. In some embodiments, the composition is administered intraarterially. In some embodiments, the composition is administered intraperitoneally. In some embodiments, the composition is administered intrathecally. In some embodiments, the composition is administered intracranially. In some embodiments, the composition is administered intracerebrally. In some embodiments, the composition is administered intracerebroventricularly. In some embodiments, the composition is administered nasally.

[0342] XVII. Manufacturing

[0343] In some embodiments of the invention, there is provided an article of manufacture containing materials useful for the treatment of a target antigen-positive disease such as cancer (for example adrenocortical carcinoma, bladder cancer, breast cancer, cervical cancer, cholangiocarcinoma, colorectal cancers, esophageal cancer, glioblastoma, glioma, hepatocellular carcinoma, head and neck cancer, kidney cancer, leukemia, lung cancer, lymphoma, melanoma, mesothelioma, multiple myeloma, pancreatic cancer, pheochromocytoma, plasmacytoma, neuroblastoma, ovarian cancer, prostate cancer, sarcoma, stomach cancer, uterine cancer or thyroid cancer) or viral infection (for example infection by CMV, EBV, HBV, KSHV, HPV, MCV, HTLV-1, HIV-1, or HCV). The article of manufacture can comprise a container and a label or package insert on or associated with the container. Suitable containers include, for example, bottles, vials, syringes, etc. The containers may be formed from a variety of materials such as glass or plastic. Generally, the container holds a composition which is effective for treating a disease or disorder described herein, and may have a sterile access port (for example the container may be an intravenous solution bag or a vial having a stopper pierceable by a hypodermic injection needle). At least one active agent in the composition is an immune cell presenting on its surface a CAR and a CSR of the invention. The label or package insert indicates that the composition is used for treating the particular condition. The label or package insert will further comprise instructions for administering the CAR plus CSR immune cell composition to the patient. Articles of manufacture and kits comprising combinatorial therapies described herein are also contemplated.

[0344] Package insert refers to instructions customarily included in commercial packages of therapeutic products that contain information about the indications, usage, dosage, administration, contraindications and/or warnings concerning the use of such therapeutic products. In some embodiments, the package insert indicates that the composition is used for treating a target antigen-positive cancer (such as adrenocortical carcinoma, bladder cancer, breast cancer, cervical cancer, cholangiocarcinoma, colorectal cancers, esophageal cancer, glioblastoma, glioma, hepatocellular carcinoma, head and neck cancer, kidney cancer, leukemia, lung cancer, lymphoma, melanoma, mesothelioma, multiple myeloma, pancreatic cancer, pheochromocytoma, plasmacytoma, neuroblastoma, ovarian cancer, prostate cancer, sarcoma, stomach cancer, uterine cancer or thyroid cancer). In other embodiments, the package insert indicates that the composition is used for treating a target antigen-positive viral infection (for example infection by CMV, EBV, HBV, KSHV, HPV, MCV, HTLV-1, HIV-1, or HCV).

[0345] Additionally, the article of manufacture may further comprise a second container comprising a pharmaceutically acceptable buffer, such as bacteriostatic water for injection (BWFI), phosphate-buffered saline, Ringer's solution and dextrose solution. It may further include other materials desirable from a commercial and user standpoint, including other buffers, diluents, filters, needles, and syringes.

[0346] Kits are also provided that are useful for various purposes, e.g., for treatment of a target antigen-positive disease or disorder described herein, optionally in combination with the articles of manufacture. Kits of the invention include one or more containers comprising a CAR plus CSR immune cell composition (or unit dosage form and/or article of manufacture), and in some embodiments, further comprise another agent (such as the agents described herein) and/or instructions for use in accordance with any of the methods described herein. The kit may further comprise a description of selection of individuals suitable for treatment. Instructions supplied in the kits of the invention are typically written instructions on a label or package insert (e.g., a paper sheet included in the kit), but machine-readable instructions (e.g., instructions carried on a magnetic or optical storage disk) are also acceptable.

[0347] For example, in some embodiments, the kit comprises a composition comprising an immune cell presenting on its surface a CAR and a CSR. In some embodiments, the kit comprises a) a composition comprising an immune cell presenting on its surface a CAR and a CSR, and b) an effective amount of at least one other agent, wherein the other agent increases the expression of MHC proteins and/or enhances the surface presentation of peptides by MHC proteins (e.g., IFNγ, IFNβ, IFNα, or Hsp90 inhibitor). In some embodiments, the kit comprises a) a composition comprising an immune cell presenting on its surface a CAR and a CSR, and b) instructions for administering the CAR plus CSR immune cell composition to an individual for treatment of a target antigen-positive disease (such as cancer or viral infection). In some embodiments, the kit comprises a) a composition comprising an immune cell presenting on its surface a CAR and a CSR, b) an effective amount of at least one other agent, wherein the other agent increases the expression of MHC proteins and/or enhances the surface presentation of peptides by MHC proteins (e.g., IFNγ, IFNβ, IFNα, or Hsp90 inhibitor), and c) instructions for administering the CAR plus CSR immune cell composition and the other agent(s) to an individual for treatment of a target antigen-positive disease (such as cancer or viral infection). The CAR plus CSR immune cell composition and the other agent(s) can be present in separate containers or in a single container. For example, the kit may comprise one distinct composition or two or more compositions wherein one composition comprises the CAR plus CSR immune cell and another composition comprises the other agent.

[0348] In some embodiments, the kit comprises a) one or more compositions comprising a CAR and a CSR, and b) instructions for combining the CAR and CSR with immune cells (such as immune cells, e.g., T cells or natural killer cells, derived from an individual) to form a composition comprising the immune cells presenting on their surface the CAR and CSR, and administering the CAR plus CSR immune cell composition to the individual for treatment of a target antigen-positive disease (such as cancer or viral infection). In some embodiments, the kit comprises a) one or more compositions comprising a CAR and a CSR, and b) an immune cell (such as a cytotoxic cell). In some embodiments, the kit comprises a) one or more compositions comprising a CAR and a CSR, b) an immune cell (such as a cytotoxic cell), and c) instructions for combining the CAR and CSR with the immune cell to form a composition comprising the immune cell presenting on its surface the CAR and CSR, and administering the CAR plus CSR immune cell composition to an individual for the treatment of a target antigen-positive disease (such as cancer or viral infection).

[0349] In some embodiments, the kit comprises a nucleic acid (or set of nucleic acids) encoding a CAR and a CSR. In some embodiments, the kit comprises a) a nucleic acid (or set of nucleic acids) encoding a CAR and a CSR, and b) a host cell (such as an immune cell) for expressing the nucleic acid (or set of nucleic acids). In some embodiments, the kit comprises a) a nucleic acid (or set of nucleic acids) encoding a CAR and a CSR, and b) instructions for i) expressing the CAR and CSR in a host cell (such as an immune cell, e.g., a T cell), ii) preparing a composition comprising the host cell expressing the CAR and CSR, and iii) administering the composition comprising the host cell expressing the CAR and CSR to an individual for the treatment of a target antigen-positive disease (such as cancer or viral infection). In some embodiments, the host cell is derived from the individual. In some embodiments, the kit comprises a) a nucleic acid (or set of nucleic acids) encoding a CAR and a CSR, b) a host cell (such as an immune cell) for expressing the nucleic acid (or set of nucleic acids), and c) instructions for i) expressing the CAR and CSR in the host cell, ii) preparing a composition comprising the host cell expressing the CAR and CSR, and iii) administering the composition comprising the host cell expressing the CAR and CSR to an individual for the treatment of a target antigen-positive disease (such as cancer or viral infection).

[0350] The kits of the invention are in suitable packaging. Suitable packaging includes, but is not limited to, vials, bottles, jars, flexible packaging (e.g., sealed Mylar or plastic bags), and the like. Kits may optionally provide additional components such as buffers and interpretative information. The present application thus also provides articles of manufacture, which include vials (such as sealed vials), bottles, jars, flexible packaging, and the like.

[0351] The instructions relating to the use of the CAR plus CSR immune cell compositions generally include information as to dosage, dosing schedule, and route of administration for the intended treatment. The containers may be unit doses, bulk packages (e.g., multi-dose packages) or sub-unit doses. For example, kits may be provided that contain sufficient dosages of a CAR plus CSR immune cell composition as disclosed herein to provide effective treatment of an individual for an extended period, such as any of a week, 8 days, 9 days, 10 days, 11 days, 12 days, 13 days, 2 weeks, 3 weeks, 4 weeks, 6 weeks, 8 weeks, 3 months, 4 months, 5 months, 7 months, 8 months, 9 months, or more. Kits may also include multiple unit doses of the CAR and CSR, and pharmaceutical compositions and instructions for use and packaged in quantities sufficient for storage and use in pharmacies, for example, hospital pharmacies and compounding pharmacies.

[0352] Those skilled in the art will recognize that several embodiments are possible within the scope and spirit of this invention. The invention will now be described in greater detail by reference to the following non-limiting examples. The following examples further illustrate the invention but, of course, should not be construed as in any way limiting its scope.

### EXAMPLES

[0353] Materials and Methods

### Cell Samples, Cell Lines, and Antibodies

[0354] The cell lines HepG2 (ATCC HB-8065; HLA-A2⁺, AFP⁺, GPC3⁺), SK-HEP-1 (ATCC HTB-52; HLA-A2⁺, AFP⁻), Raji (ATCC CCL-86; CD19⁺, CD22⁺), Nalm6 (ATCC CRL-1567; CD19⁺), Jurkat cells (ATCC TIB-152, CD20−, CD22−), RPMI-8226 (ATCC CRM-CCL-155, ROR1⁺), LNCaP (ATCC CRL-1740; PSMA⁺), and IM9 (ATCC CCL-159; HLA-A2⁺, NY-ESO-1⁺) were obtained from the American Type Culture Collection.

[0355] HepG2 is a hepatocellular carcinoma cell line that expresses AFP and GPC3; SK-HEP1 is a liver adenocarcinoma cell line that does not express AFP. SK-HEP1-AFP MG was generated by transducing the SK-HEP1 parental cell line with an AFP158 peptide expressing minigene cassette, which results in a high level of cell surface expression of AFP158/HLA-A*02:01 complex in SK-HEP1. SK-HEP1-AFP MG-GPC3 was generated by further transducing the SK-HEP1-AFP-MG cell line with an GPC3 expressing cassette, which results in a high level of cell surface expression of AFP158/HLA-A*02:01 complex and GPC3 in SK-HEP1. Raji is a Burkitt lymphoma cell line that expresses CD19 and CD22. Nalm6 is a leukemia cell line that also expresses CD19. Jurkat is an acute T cell lymphoma cell line that does not express CD22. RPMI-8226 cells are myeloma cells that express ROR1. The LNCaP prostate tumor cell line expresses PSMA. IM9 is a multiple myeloma cell line that expresses NY-ESO-1. All cell lines are cultured in RPMI 1640 or DMEM supplemented with 10% FBS and 2 mM glutamine at 37° C./5% CO₂.

[0356] Antibodies against human or mouse CD3, CD4, CD8, CD28, CCR7, CD45RA or myc tag are purchased from Invitrogen; anti-CD22 and CD20 antibodies are purchased from Biolegend.

The AFP158/HLA-A*02:01-specific antibody, the CD19-specific antibody, the CD20-specific and CD22-specific antibodies, the ROR1-specific antibody, the GPC3-specific antibody, the PSMA-specific antibody and the NY-ESO-1 antibody are developed and produced in house at Eureka Therapeutics. Flow cytometry data are collected using BD FACS Canto II and analyzed using FlowJo software package.

[0357] All peptides are purchased and synthesized by Elim Biopharma. Peptides are >90% pure. The peptides are dissolved in DMSO or diluted in saline at 10 mg/mL and frozen at −80° C. Biotinylated single chain AFP158/HLA-A*02:01 and control peptides/HLA-A*02:01 complex monomers are generated by refolding the peptides with recombinant HLA-A*02:01 and beta-2 microglobulin (02M). The monomers are biotinylated via the BSP peptide linked to the C-terminal end of HLA-A*02:01 extracellular domain (ECD) by the BirA enzyme. Fluorescence-labelled streptavidin is mixed with biotinylated peptide/HLA-A*02:01 complex monomer to form fluorescence-labelled peptide/HLA-A*02:01 tetramer.

[0358] Lentiviruses containing CARs are produced, for example, by transfection of 293T cells with vectors encoding the CARs. Primary human T cells are used for transduction after one-day stimulation with CD3/CD28 beads (Dynabeads®, Invitrogen) in the presence of interleukin-2 (IL-2) at 100 U/ml. Concentrated lentiviruses are applied to T cells in Retronectin- (Takara) coated 6-well plates for 96 hours. Transduction efficiencies of the anti-AFP/MHC CARs (or “anti-AFP CARs” or “anti-AFP-CARs”) and anti-AFP/MHC CAR plus anti-GPC3 CSR (or “anti-AFP-CAR+anti-GPC3-CSR”) constructs are assessed by flow cytometry. For anti-AFP CARs, a biotinylated AFP158/HLA-A*02:01 tetramer (“AFP158 tetramer”) with PE-conjugated streptavidin or anti-myc antibody respectively was used. For anti-GPC3 CSR, an anti-myc antibody was used. Repeat flow cytometry analyses are done on day 5 and every 3-4 days thereafter. For anti-CD19 CARs, the assay was performed using a PE-conjugated anti-CD19 anti-idiotype antibody.

[0359] Cell lines are transduced with a vector that encodes the CAR or both CAR and CSR, or with two vectors, one encoding CAR, one encoding CSR. Five days post-transduction, cell lysates are generated for western blot using an anti-myc antibody.

[0360] Tumor cytotoxicities are assayed by Cytox 96 Non-radioactive LDH Cytotoxicity Assay (Promega). CD3⁺ T cells are prepared from PBMC-enriched whole blood using EasySep Human T Cell Isolation Kit (StemCell Technologies) which negatively depletes CD14, CD16, CD19, CD20, CD36, CD56, CD66b, CD123, glycophorin A expressing cells. Human T cells are activated and expanded with, for example, CD3/CD28 Dynabeads (Invitrogen) according to manufacturer's protocol. Activated T cells (ATC) are cultured and maintained in RPMI 1640 medium with 10% FBS plus 100 U/ml IL-2 and used at day 7-14. Activated T cells (immune cells) and target cells are co-cultured at various effector-to-target ratios (e.g., 2.5:1 or 5:1) for 16 hours and assayed for cytotoxicities.

### Example 1A—Short-Term In Vitro Cancer Cell Killing Assay

[0361] Activated CAR+CD30-CSR T cells (T cells comprising a CAR and a CSR that comprises a CD30 costimulatory domain) and target cells are co-cultured at a 5:1 ratio with αCD19 or αAFP antibodies for 16 hours. Specific killing is determined by measuring LDH activity in culture supernatants. Tumor cytotoxicity is assayed by LDH Cytotoxicity Assay (Promega). Human T cells purchased from AllCells are activated and expanded with CD3/CD28 Dynabeads (Invitrogen) according to manufacturer's protocol. Activated T cells (ATC) are cultured and maintained in RPMI 1640 medium with 10% FBS plus 100 U/ml IL-2 and used at day 7-14. The T cells are >99% CD3⁺ by FACS analysis. Activated T cells (Effector cells) and the target cells, Nalm6 or HepG2 cells are co-cultured at a 5:1 ratio with different concentrations of αCD19 or αAFP antibodies, respectively for 16 hours. Cytotoxicities are then determined by measuring LDH activities in culture supernatants.

[0362] CAR+CD30-CSR T cells have higher killing efficacies than corresponding CAR T cells without CSR, and about the same killing efficacies as CAR+CD28 (or other costimulatory domain)-CSR T cells if not better.

### Example 1B—Short-Term In Vitro Cancer Cell Killing Assay

[0363] Assays comparing the short-term killing ability of the various CAR T cells (including 1^{st}-gen and 2nd-gen CAR T cells) are performed. Effector cells used in this example include the following:

1) CAR T cells without CSR;
2) CAR T cells with a CSR that comprises at least the intracellular CD30 costimulatory domain (CD30 IC domain), either with a CD30 transmembrane domain (referred to as “CAR+CD30-CSR T cells”) or a different costimulatory molecule's transmembrane (TM) domain, e.g., CD28 TM (referred to as “CAR+CD28T-CD30-CSR T cells”);
3) CAR T cells with a CSR that comprises at least intracellular CD28 costimulatory domain, either with a CD28 transmembrane domain (referred to as “CAR+CD28-CSR T cells”) or a different costimulatory molecule's transmembrane (TM) domain, e.g., CD30 TM (referred to as “CAR+CD30T-CD28-CSR T cells”);
4) CAR T cells with a CSR that comprises at least intracellular 4-1BB costimulatory domain, either with a 4-1BB TM domain (referred to as “CAR+41BB-CSR T cells”) or a different costimulatory molecule's TM domain, e.g., CD28 TM (referred to as “CAR+CD28T-41BB-CSR T cells”); and
5) CAR T cells with a CSR that comprises at least intracellular DAP10 costimulatory domain, either with a DAP10 TM domain (referred to as “CAR+DAP10-CSR T cells”) or a different costimulatory molecule's TM domain, e.g., CD28 TM (referred to as “CAR+CD28T-DAP10-CSR T cells”).

[0364] Other constructs or more detailed descriptions of constructs/T cells that can be used are disclosed herein, e.g., Example 9.

[0365] Activated effector cells and their corresponding target cells were co-cultured at an E:T ratio between 2:1 to 5:1 for 16-24 hours. Specific killing was determined by measuring LDH activity in culture supernatants. Tumor cytotoxicity was assayed by LDH Cytotoxicity Assay (Promega). Human T cells purchased from AllCells were activated and expanded with CD3/CD28 Dynabeads (Invitrogen) according to manufacturer's protocol. Activated T cells (ATC) were cultured and maintained in RPMI 1640 medium with 10% FBS plus 100 U/ml IL-2 and used at day 7-14. The T cells were >99% CD3⁺ by FACS analysis. Activated T cells (Effector cells) and the target cells e.g., HepG2 cells, were co-cultured at a 2:1 to 5:1 ratio 16-24 hours, typically 16 hours. Cytotoxicities were then determined by measuring LDH activities in culture supernatants.

[0366] The short-term killing ability of the various CAR T cells was also determined by measuring the amounts/levels of cytokines released from T cells upon engagement with target cells. The levels of cytokine release in the supernatant after 16 hour co-culture were quantified with Luminex Magpix technology using BioRad Bio-Plex kits or with ELISA. T cells with high cytotoxic potency secrete high levels of cytokines that were related to T cell activity, such as TNFα, GM-CSF, IFNγ, and IL-2.

[0367] CAR T cells with a CSR comprising at least the CD30 IC domain have higher killing efficacies than corresponding CAR T cells without CSR, and higher than or about the same killing efficacies as corresponding CAR T cells with CSRs that do not have a CD30 IC domain but have a different costimulatory molecule's IC domain, e.g., CD28, 4-1BB, or DAP10's IC domain.

### Example 2—Proliferation Potential and Persistence Assays

[0368] The proliferation and persistence of genetically modified T cells is crucial for the success of adoptive T-cell transfer therapies when treating cancers. To assay the effect of the CSR on T-cell proliferation and persistence we label T cells with the intracellular dye CFSE and observe the dilution of the dye as the T cells divide when stimulated with tumor cells. We are also able to measure persistence of the T cells by counting the number of CFSE-positive cells remaining at the indicated day.

[0369] Respective T cells are serum starved overnight and labeled with CFSE using CellTrace CFSE (Thermo Fisher C34554). 50,000 to 100,000 T cells are incubated at an effector cell to target cell ratio (E:T ratio) of 2:1 and flow cytometry is used to observe serial dilution of the CFSE dye as the T cells divide at the indicated day. The total number of T cells are counted with FACs.

[0370] CAR T cells with a CSR comprising at least the CD30 IC domain proliferate more than corresponding CAR T cells without CSR, and proliferate more than or about the same as corresponding CAR T cells with CSRs that do not have a CD30 IC domain but have a different costimulatory molecule's IC domain, e.g., CD28, 4-1BB, or DAP10's IC domain.

### Example 3A—In Vitro T Cell and Tumor Cell Counts after Multi-Week Engagements

[0371] A FACS based assay for counting target cells is used to compare the long-term killing potential of CAR+CSR T cells. Long-term killing by CAR+CD30-CSR T cells is also measured by co-culture with Raji cells. All CAR+CD30-CSR T cells show comparable survival post target cell engagement.

[0372] CAR+CD30-CSR T cells persist for longer period of time over multiple engagements of tumor cells and kill more tumor cells than corresponding CAR T cells without CSR, and about the same as CAR+CD28 (or other costimulatory domain)-CSR T cells if not better.

### Example 3B—Long-Term In Vitro T Cell and Target Cell Counts after Multi-Week Engagements

[0373] A FACS based assay for counting T cells and target cells is used to compare the long-term survival and target-cell killing potential of CAR+CD30-CSR T cells with CAR T cells without CSR or with CSRs comprising other costimulatory fragments. Typically, 50,000 to 100,000 T cells are incubated with target cells at an effector cell to target cell ratio (E:T ratio) of 2:1. The cells are rechallenged with target cells on various days, typically every 7 days after the first engagement. The numbers of remaining target cells and total T cells are quantified with FACS on various days after each target cell engagement.

[0374] CAR T cells with a CSR comprising at least the CD30 IC domain persist/survive for longer period of time over multiple engagements of tumor target cells and kill more tumor cells than corresponding CAR T cells without CSR do, and survive better and/or kill more tumor cells than or about the same as corresponding CAR T cells with CSRs that do not have a CD30 IC domain but have a different costimulatory molecule's IC domain, e.g., CD28, 4-1BB, or DAP10's IC domain.

### Example 4—In Vivo Cytokine Release

[0375] To determine the level of cytokine release in vivo, key cytokines, including those related to clinical cytokine release syndrome, are analyzed 16, 24, 48, and 72 hours after the NALM-6 tumor-bearing mice were administered CAR+CD30-CSR T cells. Cytokine levels were quantified with Luminex Magpix technology using BioRad Bio-Plex kits.

[0376] CAR+CD30-CSR T cells secrete higher levels of cytokines that are related to T cell activity, such as TNFα, GM-CSF, IFNγ, and IL-2, than corresponding CAR T cells without CSR. For example, CAR+CD30-CSR T cells secrete higher levels of cytokines that are related to T cell activity, such as TNFα, GM-CSF, IFNγ, and IL-2, than CAR+CD28 (or other costimulatory domain)-CSR T cells.

### Example 5A—Differentiation of T-Cell Subsets Over Time (CCR7/CD45RA)

[0377] Proliferation and survival of CAR+CD30-CSR T cells is measured before and after target cell engagement in two independent flow cytometric assays. FACS analysis of CAR+CD30-CSR T cells shows a greater level of expression of the T cell differentiation markers CCR7 and CD45RA compared to CAR+CD28 (or other costimulatory domain)-CSR T cells prior to target engagement.

[0378] CAR+CD30-CSR T cells have increased percentage of memory and naïve T cells as compared to CAR+CD28 (or other costimulatory domain)-CSR T cells.

### Example 5B—Differentiation of T Cell Subsets Over Time (CCR7/CD45RA) and Memory T Cell Quantification

[0379] CAR+CD30-CSR T cells develop into and maintain a high memory T cell population after target stimulation, including central memory and effector memory T cells. To determine the effect of expressing CAR+CD30-CSR on T cells' ability to develop into and maintain memory T cells as compared to expressing CAR only or CAR co-expressed with a CSR comprising a different costimulatory fragment, e.g., CD28, 4-1BB, or DAP10's IC domain, we measure the cell surface expression of memory T cell markers CCR7 and CD45RA. As known in the field, T cells with high CCR7 expression levels and low CD45RA expression levels are considered as central memory T cells, T cells with low CCR7 and low CD45RA expression levels are effector memory T cells, T cells with low CCR7 and high CD45RA expression levels are effector T cells, while T cells with high CCR7 and high CD45RA are naïve T cells which are the initial type of T cells before target/antigen challenge/recognition (Mahnke et al., Eur J Immunol. 43(11):2797-809, 2013). When in response to antigen encounter, naïve T cells proliferate and differentiate into effector cells, most of which carry out the job of destroying targets and then die, while a small pool of T cells ultimately develops into long-lived memory T cells which can store the T cell immunity against the specific target. Among the memory T cells, the central memory T cells are found to have longer lives than effector memory T cells and be capable of generating effector memory T cells, but not vice versa. Therefore, the ability to develop into and maintain memory T cells, especially central memory T cells, is an important and desired feature for potentially successful T cell therapies.

[0380] The effector cells expressing CAR constructs alone are incubated with target cells at an E:T ratio of 2:1 (e.g., 100,000 receptor⁺ T cells and 50,000 target cells in each well on a 96-well plate) for 7 days. The cells are then rechallenged with 50,000-100,000 target cells per well every 7 days.

[0381] The CAR+CD30-CSR and CAR+other CSR T cells are incubated with target cells at an E:T ratio of 1:2 (e.g., 25,000 receptor⁺ T cells and 50,000 target cells in each well) for 7 days. The cells are then rechallenged with 50,000-100,000 target cells per well every 7 days.

[0382] In some experiments, the CAR+CSR T cell and target cell mixtures are diluted 1:6 before the fourth and fifth target cell engagement (E4 and E5) to avoid the overcrowdedness of T cells due to the significant T cell expansion, so that only one sixth of the previously remaining cells are rechallenged with 50,000-100,000 target cells.

[0383] On selected days after each target cell engagement, the entire cell mixture in a well from each sample is stained with antibodies against CCR7 and CD45RA and analyzed by flow cytometry. Receptor⁺ T cell numbers are counted, and cells are grouped into various T cell types based on their CCR7 and CD45RA expression levels: central memory T cells (CD45RA-CCR7⁺), effector memory T cells (CD45RA⁻ CCR7⁻), effector T cells (CD45RA⁺ CCR7⁻), and naïve T cells (CD45RA⁺ CCR7⁺). Percentages of various types of T cells among the total number of receptor⁺ T cells are calculated. In some experiments, the cells are also stained with antibodies against CD8 or CD4 to determine the CD8-CD4 characteristics of the counted T cells.

[0384] Proliferation and survival of CAR or CAR+CSR T cells are measured before and after target cell engagement. CAR T cells with a CSR comprising at least the CD30 IC domain are able to develop into and maintain high numbers and high percentages of central memory T cells upon engagement with target calls, higher than T cells expressing CAR alone or co-expressing CAR and a CSR that does not have a CD30 IC domain but has a different costimulatory molecule's IC domain, e.g., CD28, 4-1BB, or DAP10's IC domain.

### Example 6—Expression of T Cell Exhaustion Markers in T Cells after Co-Culture with Target Cells

[0385] Molecules such as PD-1, LAG3, TIM3, and TIGIT are inhibitory receptors that accumulate on T cells as T cells lose function. Because of this phenomenon these molecules' expression is seen as a marker of exhausted T cells. To examine the level of exhaustion markers expressed on CAR+CSR-transduced cells upon antigen stimulation, CD3⁺ T cells are prepared from PBMC-enriched whole blood using EasySep Human T Cell Isolation Kit (StemCell Technologies) and activated with CD3/CD28 Dynabeads as above. The activated and expanded cell population is >99% CD3⁺ by flow cytometry. These cells are then transduced with lentiviral vectors encoding a CAR+CD30-CSR, with other CSR, or no CSR for 7-9 days. The transduced T cells (effector cells) are co-cultured with target cells for 16 hours at an effector-to-target ratio in the range of 1:1 to 2.5:1. Using antibodies to exhaustion marker PD-1, LAG3, TIGIT, or TIM3, the level of exhaustion markers, e.g., MFI levels, on the transduced T cells are analyzed by flow cytometry. In some experiments, the cells are incubated for longer times and rechallenged with target cells every 7 days, and exhaustion marker levels are measured on selected days after each target cell engagement.

[0386] Over a series of target cell engagements, CAR+CD30-CSR T cells have lower levels of T cell exhaustion markers than corresponding CAR T cells without CSR and the other tested costimulatory domain-CSR T cells, e.g., CAR+CD28 (or other costimulatory domain)-CSR T cells. CAR T cells with a CSR comprising at least the CD30 IC domain have lower levels of T cell exhaustion markers than corresponding CAR T cells without CSR do, and have lower levels of T cell exhaustion markers than corresponding CAR T cells with CSRs that do not have a CD30 IC domain but have a different costimulatory molecule's IC domain, e.g., CD28, 4-1BB, or DAP10's IC domain.

### Example 7—Tumor Cell Killing

[0387] Assays comparing the tumor cell killing ability of the various T cells are performed. Activated T cells and target cells are co-cultured at a 5:1 ratio for 16 hours. Specific killing is determined by measuring LDH activity in culture supernatants. Tumor cytotoxicity is assayed by a LDH Cytotoxicity Assay (Promega). Human T cells purchased from AllCells are activated and expanded with CD3/CD28 Dynabeads (Invitrogen) according to manufacturer's protocol. Activated T cells (ATC) are cultured and maintained in RPMI 1640 medium with 10% FBS plus 100 U/ml IL-2 and used at day 7-14. The T cells are >99% CD3⁺ by FACS analysis. Activated T cells (Effector cells) and the target cells, Nalm6 or HepG2 cells, are co-cultured at a 5:1 ratio for 16 hours. Cytotoxicities are then determined by measuring LDH activities in culture supernatants.

[0388] CAR+CD30-CSR T cells have higher in vivo tumor cell killing efficacies than corresponding CAR T cells without CSR and CAR+CD28 (or other costimulatory domain)-CSR T cells.

### Example 8A—In Vivo Tumor Infiltration/Penetration by T Cells

[0389] About 10⁷ HepG2 tumor cells are implanted subcutaneously in NSG mice and allowed to form a solid tumor mass 150 mm³. 5×10⁶ CAR+ T cells are injected i.v. into the tumor bearing mice. 3 weeks after T-cell dosing, the mice are sacrificed and tumors removed, fixed and sectioned onto slides. Tumor sections are stained with CD3 antibody to visualize the T cells that are present within the solid tumor. Quantification of the number of CD3⁺ cells can be used to score the tumor infiltration ability of the T cells (T-cell/mm²)

[0390] CAR+CD30-CSR T cells have higher in vivo tumor infiltration/penetration rates/levels (i.e., higher numbers of T cells/mm²) than corresponding CAR T cells without CSR or corresponding CAR+CD28 (or other costimulatory domain)-CSR T cells.

### Example 8B—In Vivo Tumor Infiltration by T Cells

[0391] About 10⁷ tumor cells used for an animal model, e.g., HepG2 cells for liver cancer animal model, Nalm6 or Raji cells for CD19⁺ lymphoma animal model, Jekol for ROR1⁺ lymphoma animal model, MDA-MB-231 cells for ROR1⁺ breast cancer animal model, RPMI8226 cells for ROR1V multiple myeloma animal model, A549 cells, H1975 cells, or H1703 cells for ROR1⁺ lung cancer animal model, are implanted subcutaneously in NSG mice and allowed to form a solid tumor, e.g., a solid tumor with the mass of about 150-250 mm³, over a period of time. About 5×10⁶ to 1×10⁷ various CAR T cells (e.g., CAR only, CAR+CD30 CSR, CAR+CD28-CSR, CAR+DAP10-CSR, CAR+4-1BB-CSR, or CAR+other costimulatory domain-CSR T cells), are injected i.v. into the tumor bearing mice. 10 days to 3 weeks after T-cell dosing, the mice are sacrificed and tumors removed, fixed and sectioned onto slides.

[0392] Immunohistochemistry is performed on tumor sections to stain for CD3, a T cell marker, to visualize the T cells that are present within the solid tumor, representing all the T cells that infiltrated the solid tumor (including those penetrated the tumor and those proliferated/expanded from the penetrated T cells). The CD3-positive and CD3-negative cells in these sections were quantified, e.g., with an automated immunohistochemistry imager and/or using the QuPath software, in order to determine the fraction of tumor mass infiltrated by T cells, expressed as % of all cells that are CD3⁺ cells (T cells) or number of T cells/mm² tumor section. Higher % of T cells among all cells or higher number of T cells/mm² indicates higher/increased tumor infiltration rates/levels by the T cells, which reflects a combination of tumor penetration and cell proliferative capacities of the T cells.

[0393] CAR T cells with a CSR comprising at least the CD30 IC domain have higher in vivo tumor infiltration rates/levels/capabilities than corresponding CAR T cells without CSR or corresponding CAR T cells with CSRs that do not have a CD30 IC domain but have a different costimulatory molecule's IC domain, e.g., CD28, 4-1BB, or DAP10's IC domain.

### Example 9—Constructs

[0394] For liver cancers including HCC:

Constructs: 1^{st}-gen and 2^{nd}-gen anti-AFP CARs co-expressed with anti-GPC3 CSRs comprising CD28 or CD30 co-stimulatory fragments.
Construct: 1^{st}-gen αAFP-CD8T-z-CAR: a 1^{st} generation CAR comprising anti-AFP/MHC EC, CD8 TM, and CD3zeta IC (NO co-stim).
Construct: 1^{st}-gen αAFP-CD8T-z-CAR+αGPC3-CD28-CSR: 1^{st}-gen anti-AFP-CD8T-z-CAR co-expressed with a CSR comprising anti-GPC3 EC, CD28 TM, and CD28 IC
Construct: 1^{st}-gen αAFP-CD8T-z-CAR+αGPC3-CD30-CSR: 1^{st}-gen anti-AFP-CD8T-z-CAR co-expressed with a CSR comprising anti-GPC3 EC, CD30 TM, and CD30 IC
Construct: 1^{st}-gen αAFP-CD8T-z-CAR+αGPC3-CD8T-CD30-CSR: 1^{st}-gen anti-AFP-CD8T-z-CAR co-expressed with a CSR comprising anti-GPC3 EC, CD8 TM, and CD30 IC
Construct: αAFP-CD8T-CD30z-CAR: a 2^{nd} generation CAR comprising anti-AFP/MHC EC, CD8 TM, CD30 IC, and CD3zeta IC
Construct: αAFP-CD8T-CD30z-CAR+αGPC3-CD28-CSR: anti-AFP-CD8T-CD30z-CAR co-expressed with a CSR comprising anti-GPC3 EC, CD28 TM, and CD28 IC
Construct: αAFP-CD8T-CD30z-CAR+αGPC3-CD30-CSR: anti-AFP-CD8T-CD30z-CAR co-expressed with a CSR comprising anti-GPC3 EC, CD30 TM, and CD30 IC
Construct: αAFP-CD8T-CD30z-CAR+αGPC3-CD8T-CD30-CSR: anti-AFP-CD8T-CD30z-CAR co-expressed with a CSR comprising anti-GPC3 EC, CD8 TM, and CD30 IC
Construct: αAFP-CD28z-CAR: a 2^{nd} generation CAR comprising anti-AFP/MHC EC, CD28 TM, CD28 IC, and CD3zeta IC
Construct: αAFP-CD28z-CAR+αGPC3-CD28-CSR: anti-AFP-CD28z-CAR co-expressed with a CSR comprising anti-GPC3 EC, CD28 TM, and CD28 IC
Construct: αAFP-CD28z-CAR+αGPC3-CD30-CSR: anti-AFP-CD28z-CAR co-expressed with a CSR comprising anti-GPC3 EC, CD30 TM, and CD30 IC
Construct: αAFP-CD28z-CAR+αGPC3-CD8T-CD30-CSR: anti-AFP-CD28z-CAR co-expressed with a CSR comprising anti-GPC3 EC, CD8 TM, and CD30 IC
Construct: αAFP-CD8T-41BBz-CAR: a 2^{nd} generation CAR comprising anti-AFP/MHC EC, CD8 TM, 4-1BB IC, and CD3zeta IC
Construct: αAFP-CD8T-41BBz-CAR+αGPC3-CD30-CSR: anti-AFP-CD8T-41BBz CAR co-expressed with a CSR comprising anti-GPC3 EC, CD30 TM and CD30 IC

### Construct: αAFP-CD8T-CD30z-CAR+αGPC3-CD30-CSR

[0395] Construct: αAFP-CD8T-CD30z-CAR+αGPC3-41BB-CSR: anti-AFP-CD8T-CD30z-CAR co-expressed with a CSR comprising anti-GPC3 EC, 4-1BB TM, and 4-1BB IC
Construct: αAFP-CD8T-CD30z-CAR+αGPC3-OX40-CSR: anti-AFP-CD8T-CD30z-CAR co-expressed with a CSR comprising anti-GPC3 EC, OX40 TM, and OX40 IC
Construct: αAFP-CD8T-CD30z-CAR+αGPC3-CD27-CSR: anti-AFP-CD8T-CD30z-CAR co-expressed with a CSR comprising anti-GPC3 EC, CD27 TM, and CD27 IC
Construct: αAFP-CD8T-CD30z-CAR+αGPC3-CD30-CSR: anti-AFP-CD8T-CD30z-CAR co-expressed with a CSR comprising anti-GPC3 EC, CD30 TM, and CD30 IC
Construct: αAFP-CD8T-CD30z-CAR+αGPC3-CD30T-CD28-CSR: anti-AFP-CD8T-CD30z-CAR co-expressed with a CSR comprising anti-GPC3 EC, CD30 TM, and CD28 IC
Construct: αAFP-CD8T-CD30z-CAR+αGPC3-CD30T-41BB-CSR: anti-AFP-CD8T-CD30z-CAR co-expressed with a CSR comprising anti-GPC3 EC, CD30 TM, and 4-1BB IC
Construct: αAFP-CD8T-CD30z-CAR+αGPC3-CD30T-OX40-CSR: anti-AFP-CD8T-CD30z-CAR co-expressed with a CSR comprising anti-GPC3 EC, CD30 TM, and OX40 IC
Construct: αAFP-CD8T-CD30z-CAR+αGPC3-CD30T-CD27-CSR: anti-AFP-CD8T-CD30z-CAR co-expressed with a CSR comprising anti-GPC3 EC, CD30 TM, and CD27 IC
Construct: αAFP-CD8T-CD30z-CAR+αGPC3-CD28T-CD30-CSR: anti-AFP-CD8T-CD30z-CAR co-expressed with a CSR comprising anti-GPC3 EC, CD28 TM, and CD30 IC
Construct: αAFP-CD8T-CD30z-CAR+αGPC3-CD28-CSR: anti-AFP-CD8T-CD30z-CAR co-expressed with a CSR comprising anti-GPC3 EC, CD28 TM, and CD28 IC
Construct: αAFP-CD8T-CD30z-CAR+αGPC3-CD28T-41BB-CSR: anti-AFP-CD8T-CD30z-CAR co-expressed with a CSR comprising anti-GPC3 EC, CD28 TM, and 4-1BB IC
Construct: αAFP-CD8T-CD30z-CAR+αGPC3-CD28T-OX40-CSR: anti-AFP-CD8T-CD30z-CAR co-expressed with a CSR comprising anti-GPC3 EC, CD28 TM, and OX40 IC
Construct: αAFP-CD8T-CD30z-CAR+αGPC3-CD28T-CD27-CSR: anti-AFP-CD8T-CD30z-CAR co-expressed with a CSR comprising anti-GPC3 EC, CD28 TM, and CD27 IC
Construct: αAFP-CD8T-CD30z-CAR+αGPC3-41BBT-CD30-CSR: anti-AFP-CD8T-CD30z-CAR co-expressed with a CSR comprising anti-GPC3 EC, 4-1BB TM, and CD30 IC
Construct: αAFP-CD8T-CD30z-CAR+αGPC3-41BB-CSR: anti-AFP-CD8T-CD30z-CAR co-expressed with a CSR comprising anti-GPC3 EC, 4-1BB TM, and 4-1BB IC
Construct: αAFP-CD8T-CD30z-CAR+αGPC3-41BBT-CD28-CSR: anti-AFP-CD8T-CD30z-CAR co-expressed with a CSR comprising anti-GPC3 EC, 4-1BB TM, and CD30 IC
Construct: αAFP-CD8T-CD30z-CAR+αGPC3-41BBT-OX40-CSR: anti-AFP-CD8T-CD30z-CAR co-expressed with a CSR comprising anti-GPC3 EC, 4-1BB TM, and 4-1BB IC
Construct: αAFP-CD8T-CD30z-CAR+αGPC3-41BBT-CD27-CSR: anti-AFP-CD8T-CD30z-CAR co-expressed with a CSR comprising anti-GPC3 EC, 4-1BB TM, and CD27 IC
Construct: αAFP-CD8T-CD30z-CAR+αGPC3-OX40T-CD30-CSR: anti-AFP-CD8T-CD30z-CAR co-expressed with a CSR comprising anti-GPC3 EC, OX40 TM, and CD30 IC
Construct: αAFP-CD8T-CD30z-CAR+αGPC3-OX40-CSR: anti-AFP-CD8T-CD30z-CAR co-expressed with a CSR comprising anti-GPC3 EC, OX40 TM, and OX40 IC
Construct: αAFP-CD8T-CD30z-CAR+αGPC3-OX40T-CD28-CSR: anti-AFP-CD8T-CD30z-CAR co-expressed with a CSR comprising anti-GPC3 EC, OX40 TM, and CD28 IC
Construct: αAFP-CD8T-CD30z-CAR+αGPC3-OX40T-41BB-CSR: anti-AFP-CD8T-CD30z-CAR co-expressed with a CSR comprising anti-GPC3 EC, OX40 TM, and 4-1BB IC
Construct: αAFP-CD8T-CD30z-CAR+αGPC3-OX40T-CD27-CSR: anti-AFP-CD8T-CD30z-CAR co-expressed with a CSR comprising anti-GPC3 EC, OX40 TM, and CD27 IC
Construct: αAFP-CD8T-CD30z-CAR+αGPC3-CD27T-CD30-CSR: anti-AFP-CD8T-CD30z-CAR co-expressed with a CSR comprising anti-GPC3 EC, CD27 TM, and CD30 IC
Construct: αAFP-CD8T-CD30z-CAR+αGPC3-CD27-CSR: anti-AFP-CD8T-CD30z-CAR co-expressed with a CSR comprising anti-GPC3 EC, CD27 TM, and CD27 IC
Construct: αAFP-CD8T-CD30z-CAR+αGPC3-CD27T-41BB-CSR: anti-AFP-CD8T-CD30z-CAR co-expressed with a CSR comprising anti-GPC3 EC, CD27 TM, and 4-1BB IC
Construct: αAFP-CD8T-CD30z-CAR+αGPC3-CD27T-OX40-CSR: anti-AFP-CD8T-CD30z-CAR co-expressed with a CSR comprising anti-GPC3 EC, CD27 TM, and OX40 IC
Construct: αAFP-CD8T-CD30z-CAR+αGPC3-CD27T-CD28-CSR: anti-AFP-CD8T-CD30z-CAR co-expressed with a CSR comprising anti-GPC3 EC, CD27 TM, and CD28 IC
Construct: αAFP-CD8T-CD30z-CAR+αGPC3-CD8T-CD30-CSR: anti-AFP-CD8T-CD30z-CAR co-expressed with a CSR comprising anti-GPC3 EC, CD8 TM, and CD30 IC
Construct: αAFP-CD8T-CD30z-CAR+αGPC3-CD8T-CD28-CSR: anti-AFP-CD8T-CD30z-CAR co-expressed with a CSR comprising anti-GPC3 EC, CD8 TM, and CD28 IC
Construct: αAFP-CD8T-CD30z-CAR+αGPC3-CD8T-41BB-CSR: anti-AFP-CD8T-CD30z-CAR co-expressed with a CSR comprising anti-GPC3 EC, CD8 TM, and 4-1BB IC
Construct: αAFP-CD8T-CD30z-CAR+αGPC3-CD8T-OX40-CSR: anti-AFP-CD8T-CD30z-CAR co-expressed with a CSR comprising anti-GPC3 EC, CD8 TM, and OX40 IC
Construct: αAFP-CD8T-CD30z-CAR+αGPC3-CD8T-CD27-CSR: anti-AFP-CD8T-CD30z-CAR co-expressed with a CSR comprising anti-GPC3 EC, CD8 TM, and CD27 IC
Constructs: 1^{st}-gen and 2^{nd}-gen anti-GPC3 CARs co-expressed with anti-GPC3 CSRs comprising CD28 or CD30 co-stimulatory fragments.
Construct: 1^{st}-gen αGPC3-CD8T-z-CAR: a 1st generation CAR comprising anti-GPC3 EC, CD8 TM, and CD3zeta IC (NO co-stim).
Construct: 1^{st}-gen αGPC3-CD8T-z-CAR+αGPC3-CD28-CSR: 1^{st}-gen anti-GPC3-CD8T-z-CAR co-expressed with a CSR comprising anti-GPC3 EC, CD28 TM, and CD28 IC
Construct: 1^{st}-gen αGPC3-CD8T-z-CAR+αGPC3-CD30-CSR: 1^{st}-gen anti-GPC3-CD8T-z-CAR co-expressed with a CSR comprising anti-GPC3 EC, CD30 TM, and CD30 IC
Construct: 1^{st}-gen αGPC3-CD8T-z-CAR+αGPC3-CD8T-CD30-CSR: 1^{st}-gen anti-GPC3-CD8T-z-CAR co-expressed with a CSR comprising anti-GPC3 EC, CD8 TM, and CD30 IC
Construct: αGPC3-CD8T-CD30z-CAR: a 2^{nd} generation CAR comprising anti-GPC3/MHC EC, CD8 TM, CD30 IC, and CD3zeta IC
Construct: αGPC3-CD8T-CD30z-CAR+αGPC3-CD28-CSR: anti-GPC3-CD8T-CD30z-CAR co-expressed with a CSR comprising anti-GPC3 EC, CD28 TM, and CD28 IC
Construct: αGPC3-CD8T-CD30z-CAR+αGPC3-CD30-CSR: anti-GPC3-CD8T-CD30z-CAR co-expressed with a CSR comprising anti-GPC3 EC, CD30 TM, and CD30 IC
Construct: αGPC3-CD8T-CD30z-CAR+αGPC3-CD8T-CD30-CSR: anti-GPC3-CD8T-CD30z-CAR co-expressed with a CSR comprising anti-GPC3 EC, CD8 TM, and CD30 IC
Construct: αGPC3-CD28z-CAR: a 2^{nd} generation CAR comprising anti-GPC3 EC, CD28 TM, CD28 IC, and CD3zeta IC
Construct: αGPC3-CD28z-CAR+αGPC3-CD28-CSR: anti-GPC3-CD28z-CAR co-expressed with a CSR comprising anti-GPC3 EC, CD28 TM, and CD28 IC
Construct: αGPC3-CD28z-CAR+αGPC3-CD30-CSR: anti-GPC3-CD28z-CAR co-expressed with a CSR comprising anti-GPC3 EC, CD30 TM, and CD30 IC
Construct: αGPC3-CD28z-CAR+αGPC3-CD30T-CD28-CSR: anti-GPC3-CD28z-CAR co-expressed with a CSR comprising anti-GPC3 EC, CD30 TM, and CD28 IC
Construct: αGPC3-CD28z-CAR+αGPC3-CD8T-CD30-CSR: anti-GPC3-CD28z-CAR co-expressed with a CSR comprising anti-GPC3 EC, CD8 TM, and CD30 IC

[0396] For blood cancers including leukemias and lymphomas:

Construct: 1^{st}-gen and 2^{nd}-gen anti-CD19 CARs co-expressed with anti-CD19 CSRs comprising CD28 or CD30 co-stimulatory fragments
Construct: 1^{st}-gen αCD19-CD8T-z-CAR: a 1st generation CAR comprising anti-CD19 EC, CD8 TM, and CD3zeta IC (NO co-stim)
Construct: 1^{st}-gen αCD19-CD8T-z-CAR+αCD19-CD28-CSR: 1^{st}-gen anti-CD19-CD8T-z-CAR co-expressed with a CSR comprising anti-CD19 EC, CD28 TM, and CD28 IC
Construct: 1^{st}-gen αCD19-CD8T-z-CAR+αCD19-CD30-CSR: 1^{st}-gen anti-CD19-CD8T-z-CAR co-expressed with a CSR comprising anti-CD19 EC, CD30 TM, and CD30 IC
Construct: 1^{st}-gen αCD19-CD8T-z-CAR+αCD19-CD28T-CD30-CSR: 1^{st}-gen anti-CD19-CD8T-z-CAR co-expressed with a CSR comprising anti-CD19 EC, CD28 TM, and CD30 IC
Construct: αCD19-CD30z-CAR: a 2^{nd} generation CAR comprising anti-CD19 EC, CD30 TM, CD30 IC, and CD3zeta IC
Construct: αCD19-CD30z-CAR+αCD19-CD28-CSR: anti-CD19-CD30z-CAR co-expressed with a CSR comprising anti-CD19 EC, CD28 TM, and CD28 IC
Construct: αCD19-CD30z-CAR+αCD19-CD30-CSR: anti-CD19-CD30z-CAR co-expressed with a CSR comprising anti-CD19 EC, CD30 TM, and CD30 IC
Construct: αCD19-CD28z-CAR: a 2^{nd} generation CAR comprising anti-CD19 EC, CD28 TM, CD28 IC, and CD3zeta IC
Construct: αCD19-CD28z-CAR+αCD19-CD28-CSR: anti-CD19-CD28z-CAR co-expressed with a CSR comprising anti-CD19 EC, CD28 TM, and CD28 IC
Construct: αCD19-CD28z-CAR+αCD19-CD30-CSR: anti-CD19-CD28z-CAR co-expressed with a CSR comprising anti-CD19 EC, CD30 TM, and CD30 IC
Construct: αCD19-CD8T-41BBz-CAR: a 2^{nd} generation CAR comprising anti-CD19 EC, CD8 TM, 41-BB IC, and CD3zeta IC
Construct: αCD19-CD8T-41BBz-CAR+αCD19-CD28-CSR: anti-CD19-CD8T-41BBz-CAR co-expressed with a CSR comprising anti-CD19 EC, CD28 TM, and CD28 IC
Construct: αCD19-CD8T-41BBz-CAR+αCD19-CD30-CSR: anti-CD19-CD8T-41BBz-CAR co-expressed with a CSR comprising anti-CD19 EC, CD30 TM, and CD30 IC
Construct: αCD19-CD8T-41BBz-CAR+αCD19-CD28T-CD30-CSR: anti-CD19-CD8T-41BBz-CAR co-expressed with a CSR comprising anti-CD19 EC, CD28 TM, and CD30 IC
Construct: αCD19-CD8T-41BBz-CAR+αCD19-CD28T-41BB-CSR: anti-CD19-CD8T-41BBz-CAR co-expressed with a CSR comprising anti-CD19 EC, CD28 TM, and 41BB IC
Construct: A 2^{nd}-gen anti-CD19 CD30 CAR co-expressed with anti-CD19 CD30 CSRs compared to the same CARs co-expressed with CSRs comprising other co-stimulatory fragments

### Construct: αCD19-CD30z-CAR+αCD19-CD30-CSR

[0397] Construct: αCD19-CD30z-CAR+αCD19-CD28-CSR: anti-CD19-CD30z-CAR co-expressed with a CSR comprising anti-CD19 EC, CD28 TM, and CD28 IC
Construct: αCD19-CD30z-CAR+αCD19-41BB-CSR: anti-CD19-CD30z-CAR co-expressed with a CSR comprising anti-CD19 EC, 4-1BB TM, and 4-1BB IC
Construct: αCD19-CD30z-CAR+αCD19-OX40-CSR: anti-CD19-CD30z-CAR co-expressed with a CSR comprising anti-CD19 EC, OX40 TM, and OX40 IC
Construct: αCD19-CD30z-CAR+αCD19-CD27-CSR: anti-CD19-CD30z-CAR co-expressed with a CSR comprising anti-CD19 EC, CD27 TM, and CD27 IC
Construct: αCD19-CD30z-CAR+αCD19-CD28T-CD30-CSR: anti-CD19-CD30z-CAR co-expressed with a CSR comprising anti-CD19 EC, CD28 TM, and CD30 IC
Construct: αCD19-CD30z-CAR+αCD19-41BBT-CD30-CSR: anti-CD19-CD30z-CAR co-expressed with a CSR comprising anti-CD19 EC, 4-1BB TM, and CD30 IC
Construct: αCD19-CD30z-CAR+αCD19-OX40T-CD30-CSR: anti-CD19-CD30z-CAR co-expressed with a CSR comprising anti-CD19 EC, OX40 TM, and CD30 IC
Construct: αCD19-CD30z-CAR+αCD19-CD27T-CD30-CSR: anti-CD19-CD30z-CAR co-expressed with a CSR comprising anti-CD19 EC, CD27 TM, and CD30 IC
Construct: αCD19-CD30z-CAR+αCD19-CD8T-CD30-CSR: anti-CD19-CD30z-CAR co-expressed with a CSR comprising anti-CD19 EC, CD8 TM, and CD30 IC
Construct: 2^{nd}-gen anti-CD22 CARs co-expressed with anti-CD22 CSRs comprising CD28 or CD30 co-stimulatory fragments
Construct: αCD22-CD30z-CAR: a 2^{nd} generation CAR comprising anti-CD22 EC, CD30 TM, CD30 IC, and CD3zeta IC
Construct: αCD22-CD30z-CAR+αCD22-CD28-CSR: anti-CD22-CD30z-CAR co-expressed with a CSR comprising anti-CD22 EC, CD28 TM, and CD28 IC
Construct: αCD22-CD30z-CAR+αCD22-CD30-CSR: anti-CD22-CD30z-CAR co-expressed with a CSR comprising anti-CD22 EC, CD30 TM, and CD30 IC
Construct: αCD22-CD28z-CAR: a 2^{nd} generation CAR comprising anti-CD22 EC, CD28 TM, CD28 IC, and CD3zeta IC
Construct: αCD22-CD28z-CAR+αCD22-CD28-CSR: anti-CD22-CD28z-CAR co-expressed with a CSR comprising anti-CD22 EC, CD28 TM, and CD28 IC
Construct: αCD22-CD28z-CAR+αCD22-CD30-CSR: anti-CD22-CD28z-CAR co-expressed with a CSR comprising anti-CD22 EC, CD30 TM, and CD30 IC
Construct: αCD22-CD8T-41BBz-CAR: a 2^{nd} generation CAR comprising anti-CD22 EC, CD8 TM, 41-BB IC, and CD3zeta IC
Construct: αCD22-CD8T-41BBz-CAR+αCD22-CD28-CSR: anti-CD22-CD8T-41BBz-CAR co-expressed with a CSR comprising anti-CD22 EC, CD28 TM, and CD28 IC
Construct: αCD22-CD8T-41BBz-CAR+αCD22-CD30-CSR: anti-CD22-CD8T-41BBz-CAR co-expressed with a CSR comprising anti-CD22 EC, CD30 TM, and CD30 IC
Construct: 2^{nd}-gen anti-CD22 CD30 CAR co-expressed with anti-CD22 CD30 CSRs compared to the same CARs co-expressed with CSRs comprising other co-stimulatory fragments.

### Construct: αCD22-CD30z-CAR+αCD22-CD30-CSR

[0398] Construct: αCD22-CD30z-CAR+αCD22-CD28-CSR: anti-CD22-CD30z-CAR co-expressed with a CSR comprising anti-CD22 EC, CD28 TM, and CD28 IC
Construct: αCD22-CD30z-CAR+αCD22-41BB-CSR: anti-CD22-CD30z-CAR co-expressed with a CSR comprising anti-CD22 EC, 4-1BB TM, and 4-1BB IC
Construct: αCD22-CD30z-CAR+αCD22-OX40-CSR: anti-CD22-CD30z-CAR co-expressed with a CSR comprising anti-CD22 EC, OX40 TM, and OX40 IC
Construct: αCD22-CD30z-CAR+αCD22-CD27-CSR: anti-CD22-CD30z-CAR co-expressed with a CSR comprising anti-CD22 EC, CD27 TM, and CD27 IC
Construct: αCD22-CD30z-CAR+αCD22-CD28T-CD30-CSR: anti-CD22-CD30z-CAR co-expressed with a CSR comprising anti-CD22 EC, CD28 TM, and CD30 IC
Construct: αCD22-CD30z-CAR+αCD22-41BBT-CD30-CSR: anti-CD22-CD30z-CAR co-expressed with a CSR comprising anti-CD22 EC, 4-1BB TM, and CD30 IC
Construct: αCD22-CD30z-CAR+αCD22-OX40T-CD30-CSR: anti-CD22-CD30z-CAR co-expressed with a CSR comprising anti-CD22 EC, OX40 TM, and CD30 IC
Construct: αCD22-CD30z-CAR+αCD22-CD27T-CD30-CSR: anti-CD22-CD30z-CAR co-expressed with a CSR comprising anti-CD22 EC, CD27 TM, and CD30 IC
Construct: αCD22-CD30z-CAR+αCD22-CD8T-CD30-CSR: anti-CD22-CD30z-CAR co-expressed with a CSR comprising anti-CD22 EC, CD8 TM, and CD30 IC
Construct: A bispecific 2^{nd}-gen anti-CD19, anti-CD22, CD30 CAR co-expressed with anti-CD19, anti-CD22, and/or anti-CD20, CD30 CSRs
Construct: αCD19-αCD22-CD30z-CAR: a bispecific 2^{nd} generation CAR comprising anti-CD19 EC, anti-CD22 EC, CD30 TM, CD30 IC, and CD3zeta IC
Construct: αCD22-αCD19-CD30z-CAR: a bispecific 2^{nd} generation CAR comprising anti-CD22 EC, anti-CD19 EC, CD30 TM, CD30 IC, and CD3zeta IC
Construct: αCD19-CD30z-CAR: a monospecific 2^{nd} generation CAR comprising anti-CD19 EC, CD30 TM, CD30 IC, and CD3zeta IC
Construct: αCD22-CD30z-CAR: a monospecific 2^{nd} generation CAR comprising anti-CD22 EC, CD30 TM, CD30 IC, and CD3zeta IC
Construct: αCD19-αCD22-CD30z-CAR+αCD19-CD30-CSR: bispecific anti-CD19-anti-CD22-CD30z-CAR co-expressed with a monospecific CSR comprising anti-CD19 EC, CD30 TM, and CD30 IC
Construct: αCD19-αCD22-CD30z-CAR+αCD22-CD30-CSR: bispecific anti-CD19-anti-CD22-CD30z-CAR co-expressed with a monospecific CSR comprising anti-CD22 EC, CD30 TM, and CD30 IC
Construct: αCD19-αCD22-CD30z-CAR+αCD20-CD30-CSR: bispecific anti-CD19-anti-CD22-CD30z-CAR co-expressed with a monospecific CSR comprising anti-CD20 EC, CD30 TM, and CD30 IC
Construct: αCD19-CD30z-CAR+αCD22-CD30-CSR: monospecific anti-CD19-CD30z-CAR co-expressed with a monospecific CSR comprising anti-CD22 EC, CD30 TM, and CD30 IC
Construct: αCD22-CD30z-CAR+αCD19-CD30-CSR: monospecific anti-CD22-CD30z-CAR co-expressed with a monospecific CSR comprising anti-CD19 EC, CD30 TM, and CD30 IC
Construct: αCD19-CD30z-CAR+αCD20-CD30-CSR: monospecific anti-CD19-CD30z-CAR co-expressed with a monospecific CSR comprising anti-CD20 EC, CD30 TM, and CD30 IC
Construct: αCD22-CD30z-CAR+αCD20-CD30-CSR: monospecific anti-CD22-CD30z-CAR co-expressed with a monospecific CSR comprising anti-CD20 EC, CD30 TM, and CD30 IC
Construct: αCD19-αCD22-CD30z-CAR+αCD22-αCD19-CD30-CSR: bispecific anti-CD19-anti-CD22-CD30z-CAR co-expressed with a bispecific CSR comprising anti-CD22 EC, anti-CD19 EC, CD30 TM, and CD30 IC
Construct: αCD19-αCD22-CD30z-CAR+αCD20-αCD19-CD30-CSR: bispecific anti-CD19-anti-CD22-CD30z-CAR co-expressed with a bispecific CSR comprising anti-CD20 EC, anti-CD19 EC, CD30 TM, and CD30 IC
Construct: αCD19-αCD22-CD30z-CAR+αCD22-αCD20-CD30-CSR: bispecific anti-CD19-anti-CD22-CD30z-CAR co-expressed with a bispecific CSR comprising anti-CD22 EC, anti-CD20 EC, CD30 TM, and CD30 IC
Construct: αCD22-CD30z-CAR+αCD22-αCD19-CD30-CSR: monospecific anti-CD22-CD30z-CAR co-expressed with a bispecific CSR comprising anti-CD22 EC, anti-CD19 EC, CD30 TM, and CD30 IC
Construct: a tri-specific 2^{nd}-gen anti-CD19, anti-CD22, anti-CD20, CD30 CAR co-expressed with anti-CD19, anti-CD22, and/or anti-CD20, CD30 CSRs
Construct: αCD19-αCD22-αCD20-CD30z-CAR: a tri-specific 2^{nd} generation CAR comprising anti-CD19 EC, anti-CD22 EC, anti-CD20 EC, CD30 TM, CD30 IC, and CD3zeta IC
Construct: αCD19-αCD22-CD30z-CAR: a bispecific 2^{nd} generation CAR comprising anti-CD19 EC, anti-CD22 EC, CD30 TM, CD30 IC, and CD3zeta IC
Construct: αCD19-CD30z-CAR: a monospecific 2^{nd} generation CAR comprising anti-CD19 EC, CD30 TM, CD30 IC, and CD3zeta IC
Construct: αCD22-CD30z-CAR: a monospecific 2^{nd} generation CAR comprising anti-CD22 EC, CD30 TM, CD30 IC, and CD3zeta IC
Construct: αCD19-αCD22-αCD20-CD30z-CAR+αCD19-CD30-CSR: tri-specific anti-CD19-anti-CD22-anti-CD20-CD30z-CAR co-expressed with a monospecific CSR comprising anti-CD19 EC, CD30 TM, and CD30 IC
Construct: αCD19-αCD22-αCD20-CD30z-CAR+αCD22-CD30-CSR: tri-specific anti-CD19-anti-CD22-anti-CD20-CD30z-CAR co-expressed with a monospecific CSR comprising anti-CD22 EC, CD30 TM, and CD30 IC
Construct: αCD19-αCD22-αCD20-CD30z-CAR+αCD20-CD30-CSR: tri-specific anti-CD19-anti-CD22-anti-CD20-CD30z-CAR co-expressed with a monospecific CSR comprising anti-CD20 EC, CD30 TM, and CD30 IC
Construct: αCD19-αCD22-CD30z-CAR+αCD20-CD30-CSR: bispecific anti-CD19-anti-CD22-CD30z-CAR co-expressed with a monospecific CSR comprising anti-CD20 EC, CD30 TM, and CD30 IC
Construct: αCD19-CD30z-CAR+αCD22-CD30-CSR: monospecific anti-CD19-CD30z-CAR co-expressed with a monospecific CSR comprising anti-CD22 EC, CD30 TM, and CD30 IC
Construct: αCD19-CD30z-CAR+αCD20-CD30-CSR: monospecific anti-CD19-CD30z-CAR co-expressed with a monospecific CSR comprising anti-CD20 EC, CD30 TM, and CD30 IC
Construct: αCD19-αCD22-αCD20-CD30z-CAR+αCD22-αCD19-CD30-CSR: tri-specific anti-CD19-anti-CD22-anti-CD20-CD30z-CAR co-expressed with a bispecific CSR comprising anti-CD22 EC, anti-CD19 EC, CD30 TM, and CD30 IC
Construct: αCD19-αCD22-αCD20-CD30z-CAR+αCD20-αCD19-CD30-CSR: tri-specific anti-CD19-anti-CD22-anti-CD20-CD30z-CAR co-expressed with a bispecific CSR comprising anti-CD20 EC, anti-CD19 EC, CD30 TM, and CD30 IC
Construct: αCD19-αCD22-αCD20-CD30z-CAR+αCD22-αCD20-CD30-CSR: tri-specific anti-CD19-anti-CD22-anti-CD22-CD30z-CAR co-expressed with a bispecific CSR comprising anti-CD22 EC, anti-CD20 EC, CD30 TM, and CD30 IC
Construct: αCD19-αCD22-CD30z-CAR+αCD20-αCD19-CD30-CSR: bispecific anti-CD19-anti-CD22-CD30z-CAR co-expressed with a bispecific CSR comprising anti-CD20 EC, anti-CD19 EC, CD30 TM, and CD30 IC
Construct: αCD19-αCD22-CD30z-CAR+αCD22-αCD20-CD30-CSR: bispecific anti-CD19-anti-CD22-CD30z-CAR co-expressed with a bispecific CSR comprising anti-CD22 EC, anti-CD20 EC, CD30 TM, and CD30 IC
Construct: αCD19-αCD22-αCD20-CD30z-CAR+αCD22-αCD20-αCD19-CD30-CSR: tri-specific anti-CD19-anti-CD22-anti-CD20-CD30z-CAR co-expressed with a tri-specific CSR comprising anti-CD22 EC, anti-CD20 EC, anti-CD19 EC, CD30 TM, and CD30 IC

### Construct: Anti-ROR1-CAR+Anti-ROR1-CSR

[0399] For solid tumors (neuroblastoma) and CLL (most common leukemia), mantle cell lymphoma (MCL, 5% of NHL):

Construct: αROR1-CD30z-CAR: anti-ROR1 EC, CD30 TM and CD30 IC, CD3zeta IC
Construct: αROR1-CD30z-CAR+αROR1-CD30-CSR: anti-ROR1 EC, CD30 TM and IC and CD3zeta IC+anti-ROR1 EC, CD30 TM and IC
Construct: αROR1-CD30z-CAR+αROR1-CD28-CSR: anti-ROR1 EC, CD30 TM and IC and CD3zeta IC+anti-ROR1 EC, CD28 TM and IC
Construct: αROR1-CD30z-CAR+αROR1-41BB-CSR: anti-ROR1 EC, CD30 TM and IC and CD3zeta IC+anti-ROR1 EC, 4-1BB TM and IC.
Construct: αROR1-CD28z-CAR: anti-ROR1 EC, CD28 TM and CD28 IC, CD3zeta IC
Construct: αROR1-CD28z-CAR+αROR1-CD30-CSR: anti-ROR1 EC, CD28 TM and CD28 IC, CD3zeta IC+anti-ROR1 EC, CD30 TM and IC.
Construct: αROR1-CD8T-CD30z-CAR: anti-ROR1 EC, CD8 TM, CD30 IC and CD3zeta IC
Construct: αROR1-CD8T-CD30z-CAR+αROR1-CD30-CSR: anti-ROR1 EC, CD8 TM, CD30 IC and CD3zeta IC+anti-ROR1 EC, CD30 TM and IC
Construct: αROR1-CD8T-41BBz-CAR: anti-ROR1 EC, CD8 TM, 4-1BB IC and CD3zeta IC
Construct: αROR1-CD8T-41BBz-CAR+αROR1-CD30-CSR: anti-ROR1 EC, CD8 TM, 4-1BB IC and CD3zeta IC+anti-ROR1 EC, CD30 TM and IC
Construct: αROR1-CD8T-41BBz-CAR+αROR1-CD28T-CD30-CSR: anti-ROR1 EC, CD8 TM, 4-1BB IC and CD3zeta IC+anti-ROR1 EC, CD28 TM and CD30 IC
Construct: αROR1-CD8T-41BBz-CAR+αROR1-CD28T-41BB-CSR: anti-ROR1 EC, CD8 TM, 4-1BB IC and CD3zeta IC+anti-ROR1 EC, CD28 TM and 41BB IC
Construct: αROR1-CD28T-41BBz-CAR: anti-ROR1 EC, CD28 TM, 4-1BB IC and CD3zeta IC
Construct: αROR1-CD28T-41BBz-CAR+αROR1-CD30-CSR: anti-ROR1 EC, CD28 TM, 4-1BB IC and CD3zeta IC+anti-ROR1 EC, CD30 TM and IC
Construct: anti-PSMA-CAR+anti-PSMA-CSR: 2^{nd} generation anti-PSMA1 CD30 or 4-1BB CAR co-expressed with anti-PMSA-CSRs comprising CD30 TM and IC.

[0400] Prostate cancer:

Construct: αPSMA-CD30z-CAR: anti-PSMA EC, CD30 TM and IC, CD3zeta IC
Construct: αPSMA-CD30z-CAR+αPSMA-CD30-CSR: anti-PSMA EC, CD30 TM and IC and CD3zeta IC+anti-PSMA EC, CD30 TM and IC
Construct: αPSMA-CD8T-CD30z-CAR: anti-PSMA EC, CD8 TM, CD30 IC, CD3zeta IC
Construct: αPSMA-CD8T-CD30z-CAR+αPSMA-CD30-CSR: anti-PSMA EC, CD8 TM, CD30 IC and CD3zeta IC+anti-PSMA EC, CD30 TM and IC
Construct: αPSMA-CD8T-41BBz-CAR: anti-PSMA EC, CD8 TM, 4-1BB IC, CD3zeta IC
Construct: αPSMA-CD8T-41BBz-CAR+αPSMA-CD30-CSR: anti-PSMA EC, CD8 TM, 4-1BB IC and CD3zeta IC+anti-PSMA EC, CD30 TM and IC
Construct: anti-NY-ESO-1/MHC CAR+anti-EGFR-CSR: 2^{nd} generation anti-NY-ESO-1/MHC CAR with CD30 or 4-1BB IC and CD3zeta IC+anti-EGFR-CD30-CSR
Construct: αNYESO1-CD30z-CAR: anti-NY-ESO-1/MHC EC, CD30 TM and IC, CD3zeta IC
Construct: αNYESO1-CD30z-CAR+αEGFR-CD30-CSR: anti-NY-ESO-1/MHC EC, CD30 TM and IC, CD3zeta IC+αEGFR EC, CD30 TM and IC-CSR.
Construct: αNYESO1-CD8T-CD30z-CAR: anti-NY-ESO-1/MHC EC, CD8 TM, CD30 IC, CD3zeta IC αNYESO1-CD8T-CD30z-CAR+αEGFR-CD30-CSR anti-NY-ESO-1/MHC EC, CD8 TM, CD30 IC, CD3zeta IC+αEGFR EC, CD30 TM and IC CSR.
Construct: αNYESO1-CD8T-41BBz-CAR: anti-NY-ESO-1/MHC EC, CD8 TM, 4-1BB IC, CD3zeta IC
Construct: αNYESO1-CD8T-41BBz-CAR+αEGFR-CD30-CSR: anti-NY-ESO-1/MHC EC, CD8 TM, 4-1BB IC, CD3zeta IC+αEGFR EC, CD30 TM and IC CSR.

### Example 10—Short-Term Killing of Target Cells by Anti-AFP/MHC CAR+Anti-GPC3-CSR T Cells

[0401] This example shows that CAR+CD30-CSR expressing T cells have higher specific tumor cell killing efficacies than CAR T cells without CSR. Primary T cells were mock-transduced (no DNA added) or transduced with lentiviral vectors encoding: (1) anti-AFP-CD28z-CAR (SEQ ID NO:7); (2) anti-AFP-CD28z-CAR+anti-GPC3-CD30-CSR (SEQ ID NO:7+SEQ ID NO:13, respectively); (3) anti-AFP-CD8T-z-CAR (SEQ ID NO: 1); or (4) anti-AFP-CD8T-z-CAR+anti-GPC3-CD30-CSR (SEQ ID NO:1+SEQ ID NO:13, respectively) for 7-9 days. The transduction efficiency was determined by staining with PE-labeled AFP158/HLA-A*02:01 tetramers (“AFP158 tetramers”). The CAR T cells were normalized to 35% CAR⁺ (or “receptor”) and tested for their abilities to kill cancer cells with a FACS-based assay. Activated T cells and target cells HepG2 (AFP⁺, HLA-A2⁺, GPC3⁺) were co-cultured at an effector-to-target ratio of 2:1. Specific lysis was determined by measuring LDH activity in culture supernatants after 16 hr incubation using the Cytox 96 Non-radioactive Cytotoxicity Assay (Promega). As shown in FIG. 1, T cells transduced with vectors encoding both CAR (the 1^{st}-generation: anti-AFP-CD8T-z-CAR or the 2^{nd}-generation: anti-AFP-CD28z-CAR) and CD30-CSR had higher in vitro tumor cell killing efficacies than corresponding CAR T cells without CSR.

### Example 11—Cytokine Production and Secretion by Anti-AFP/MHC CAR+Anti-GPC3-CSR T Cells

[0402] This example shows CAR+CD30-CSR expressing T cells have higher specific T cell activities than CAR T cells without CSR. IFNγ and Granzyme B are both indicators for T cell activities/killing capability. After transduction, 50,000 CAR⁺ anti-AFP-CAR T cells and anti-AFP-CAR+anti-GPC3-CD30-CSR T Cells were incubated with HepG2 target cells at an effector cell to target cell ratio (E:T ratio) of 1:1. The cells are rechallenged with 100,000 Hep2G target cells every 7 days after the first engagement. After three engagements, IFNγ and Granzyme B levels in the culture supernatants were quantified with ELISA MAX™ Deluxe Set Human IFNγ by BioLegend (San Diego, Calif.) and Human Granzyme B DuoSet ELISA by R&D Systems (Minneapolis, Minn.), respectively, and the results are shown in FIGS. 2A and 2B, respectively. Reactions that demonstrated an increase in cytotoxic potency in Example 10 also showed increases in the amounts of cytokines (IFNγ and Granzyme B) released. Specifically, T cells transduced with vectors encoding both CAR (the 1^{st}-generation: anti-AFP-CD8T-z-CAR or the 2^{nd}-generation: anti-AFP-CD28z-CAR) and CD30-CSR had much higher IFNγ and Granzyme B secretion levels than corresponding CAR T cells without CSR.

### Example 12—Long-Term Killing of Target Cells by Anti-AFP/MHC CAR+Anti-GPC3-CSR T Cells and T Cell Survival

[0403] A FACS based assay for counting target cells was used to compare the long-term killing potential of CAR T cells. The effector cells used were primary T cells from donor subjects transduced with vectors encoding various CAR constructs. The effector cells were transduced with vectors encoding: 1^{st} generation CAR constructs (FIGS. 3A and 3B): (1) anti-AFP-CD8T-z-CAR (SEQ ID NO:1); (2) anti-AFP-CD8T-z-CAR+anti-GPC3-CD28-CSR (SEQ ID NO:1+SEQ ID NO:14); or (3) anti-AFP-CD8T-z-CAR+anti-GPC3-CD30-CSR (SEQ ID NO:1+SEQ ID NO:13), or 2^{nd} generation CAR constructs (FIGS. 3C and 3D): (1) anti-AFP-CD28z-CAR (SEQ ID NO:7); (2) anti-AFP-CD28z-CAR+anti-GPC3-CD28-CSR (SEQ ID NO:7+SEQ ID NO:14); or (3) anti-AFP-CD28z-CAR+anti-GPC3-CD30-CSR (SEQ ID NO:7+SEQ ID NO:13) for 7-9 days. The effector cells were normalized to 35% receptor⁺ based on AFP158 tetramer staining.

[0404] The target cells used were HepG2 (A2⁺/AFP⁺/GPC3⁺) cells. The effector to target ratio (E:T ratio) in this experiment was 1:1. Specifically, 50,000 receptor⁺ T cells and 50,000 HepG2 cells were incubated together in each well in RPMI+10% FBS with no cytokine. The cells were rechallenged with 100,000 HepG2 cells per well every 7 days. The numbers of remaining target cells and receptor⁺ T cells were quantified on selected days after each target cell engagement. The results of T cell survival (total T cell numbers, not just receptor⁺ ones) and the long-term killing (represented by remaining target cells' percentage relative to target cells incubated with mock-transduced T cells) are shown in FIGS. 3A-3D, with 1^{st}-generation CARs' results in FIGS. 3A and 3B and 2^{nd}-generation CARs' results in FIGS. 3C and 3D. FIG. 3B shows that T cells expressing the 1^{st}-generation anti-AFP-CAR co-expressed with anti-GPC3-CD30-CSR or anti-GPC3-CD28-CSR both killed many more target cells than T cell expressing the CAR alone. Surprisingly, T cells expressing the 1s-generation CAR co-expressed with CD30-CSR killed significantly more target cells than corresponding T cells with CD28-CSR.

[0405] FIG. 3D shows that T cells expressing the 2^{nd}-generation anti-AFP-CAR (anti-AFP-CD28z-CAR) co-expressed with anti-GPC3-CD30-CSR or anti-GPC3-CD28-CSR both effectively mediated the killing of almost all of the initially engaged and the rechallenged target cells, unlike T cells expressing the 2^{nd}-generation anti-AFP-CAR only which hardly killed any target cells relative to mock-transduced T cells. Surprisingly, FIGS. 3A and 3C show that T cells expressing anti-AFP-CD8-z-CAR+anti-GPC3-CD30-CSR and anti-AFP-CD28z-CAR+anti-GPC3-CD30-CSR, respectively, not only survived much better than mock-transduced T cells and T cells expressing only the corresponding CARs, but also survived and even multiplied significantly better than T cells expressing the corresponding CARs+CD28-CSR.

### Example 13—Expression of T Cell Exhaustion Markers in Anti-AFP/MHC CAR+Anti-GPC3-CSR T Cells T Cells after Co-Culture with Target Cells

[0406] To examine the level of exhaustion markers expressed on CAR-transduced cells upon antigen stimulation, CD3⁺ T cells were prepared from PBMC-enriched whole blood using EasySep Human T Cell Isolation Kit (StemCell Technologies) and activated with CD3/CD28 Dynabeads. The activated and expanded cell population was >99% CD3⁺ by flow cytometry. These cells were then transduced with lentiviral vectors encoding the construct described in Tables 2, 3, and 4 below for 7-9 days. The transduced cells (effector cells) were normalized to 35% receptor⁺ based on AFP158 tetramer staining. The effector cells were then co-cultured with HepG2 target cells at an E:T ratio of 1:1. Specifically, 50,000 receptor⁺ T cells and 50,000 HepG2 cells were incubated together in each well in RPMI+10% FBS with no cytokine. The cells were rechallenged with 100,000 HepG2 cells per well every 7 days. The MFI levels of exhaustion markers PD-1, LAG3, and TIGIT on the receptor⁺ T cells were analyzed by flow cytometry on selected days after each target cell engagement. PD-1, LAG3, and TIGIT are inhibitory receptors that accumulate on T cells as T cells lose function. Because of this phenomenon these molecules' expression is seen as a marker of exhausted T cells. The MFI levels of these exhaustion markers and ratios of some exhaustion marker levels of the CAR+CD30-CSR T cells over those of CAR+CD28-CSR or CAR alone T cells are shown in Tables 2, 3, and 4. Surprisingly, expressing CAR+CD30-CSR resulted in T cells with significantly less exhaustion marker accumulation than expressing CAR alone or CAR+CD28-CSR, indicative of significantly more functional and less exhausted T cells. Also significantly, the lower levels of T cell exhaustion markers resulted from CAR+CD30-CSR expression were seen in both CD8⁺ T cells (cytotoxic T cells which are more directly involved in target cell killing) and CD4⁺ T cells (T helper cells which help the function of other immune cells including the activation and growth of cytotoxic T cells).

TABLE 2
PDI Expression Levels on Receptor⁺ T Cells

| | | | | Ratio of PDI | Ratio |
|---|---|---|---|---|---|
| | | | | Expression | of PDI |
| | | | | Levels | Expression |
| | | | | CAR + | Levels |
| | | | | CD30-CSR/ | CAR + |
| | | | | CAR + | CD30- |
| Date | | | | CD28-CSR | CSR/CAR |
| | PDI Expression Level on 1^{st}-gen CAR⁺ | | | | |
| | CD8⁺ T Cells (MFI) | | | | |
| | | αAFP- | αAFP- | | |
| | | CD8T-Z- | CD8T-Z- | | |
| | αAFP- | CAR + | CAR + | | |
| | CD8T-Z- | αGPC3- | αGPC3- | | |
| | CAR | CD30-CSR | CD28-CSR | | |
| E1D5 | 403 | 66.1 | 92.9 | 0.71 | 0.16 |
| E2D5 | 607 | 102 | 235 | 0.43 | 0.17 |
| E3D5 | 541 | 61.8 | 392 | 0.16 | 0.11 |
| | PDI Expression Level on 2^{nd}-gen CAR⁺ | | | | |
| | CD8⁺ T Cells (MFI) | | | | |
| | | αAFP- | αAFP- | | |
| | | CD28z- | CD28z- | | |
| | αAFP- | CAR + | CAR + | | |
| | CD28z- | αGPC3- | αGPC3- | | |
| | CAR | CD30-CSR | CD28-CSR | | |
| E1D5 | 599 | 69.5 | 173 | 0.40 | 0.12 |
| E2D5 | 952 | 91.5 | 405 | 0.23 | 0.10 |
| E3D5 | 652 | 42.8 | 281 | 0.15 | 0.07 |
| | PD1 Expression Level on 1^{st}-gen CAR⁺ | | | | |
| | CD4⁺ T Cells (MFI) | | | | |
| | | αAFP- | αAFP- | | |
| | | CD8T-Z- | CD8T-Z- | | |
| | αAFP- | CAR + | CAR + | | |
| | CD8T-Z- | αGPC3- | αGPC3- | | |
| | CAR | CD30-CSR | CD28-CSR | | |
| E1D5 | 1114 | 193 | 434 | 0.44 | 0.17 |
| E2D5 | 1092 | 288 | 1084 | 0.27 | 0.26 |
| E3D5 | 855 | 168 | 1703 | 0.10 | 0.20 |
| | PD1 Expression Level on 2^{nd}-gen CAR⁺ | | | | |
| | CD4⁺ T Cells (MFI) | | | | |
| | | αAFP- | αAFP- | | |
| | | CD28z- | CD28z- | | |
| | αAFP- | CAR + | CAR + | | |
| | CD28z- | αGPC3- | αGPC3- | | |
| | CAR | CD30-CSR | CD28-CSR | | |
| E1D5 | 1764 | 203 | 748 | 0.27 | 0.12 |
| E2D5 | 2280 | 322 | 1516 | 0.21 | 0.14 |
| E3D5 | 2350 | 161 | 1236 | 0.13 | 0.07 |

TABLE 3A
LAG3 Expression Levels on Receptor⁺ T Cells

| | | | | Ratio of |
|---|---|---|---|---|
| | LAG3 Expression Level | | | LAG3 |
| | on 1^{st}-gen CAR⁺ CD8⁺ | | | Expression |
| | T Cells (MFI) | | | Levels |
| | | αAFP-CD8T- | αAFP-CD8T- | CAR + |
| | αAFP- | Z-CAR + | Z-CAR + | CD30-CSR/ |
| | CD8T- | αGPC3- | αGPC3- | CAR + |
| Date | z-CAR | CD30-CSR | CD28-CSR | CD28-CSR |
| E1D5 | 514 | 432 | 571 | 0.76 |
| E2D5 | 208 | 225.1 | 346.8 | 0.65 |
| E3D5 | 420 | 448 | 655 | 0.68 |

TABLE 3B
LAG3 Expression Levels on Receptor⁺ T Cells

| | LAG3 Expression Level | | | Ratio of | |
|---|---|---|---|---|---|
| | on 2^{nd}-gen CAR⁺ CD8⁺ | | | LAG3 | Ratio of |
| | T Cells (MFI) | | | Expression | LAG3 |
| | | αAFP- | αAFP- | Levels | Expression |
| | | CD28z- | CD28z- | CAR + | Levels |
| | αAFP- | CAR + | CAR + | CD30-CSR/ | CAR + |
| | CD28z- | αGPC3- | αGPC3- | CAR + | CD30- |
| Date | CAR | CD30-CSR | CD28-CSR | CD28-CSR | CSR/CAR |
| E1D5 | 1004 | 814 | 1601 | 0.51 | 0.81 |
| E2D5 | 868 | 356 | 691 | 0.52 | 0.41 |
| E3D5 | 1248 | 575 | 830 | 0.69 | 0.46 |

TABLE 3C
LAG3 Expression Levels on Receptor⁺ T Cells

| | | | | Ratio of |
|---|---|---|---|---|
| | LAG3 Expression Level | | | LAG3 |
| | on 1^{st}-gen CAR⁺ CD4⁺ | | | Expression |
| | T Cells (MFI) | | | Levels |
| | | αAFP-CD8T- | αAFP-CD8T- | CAR + |
| | αAFP- | Z-CAR + | Z-CAR + | CD30-CSR/ |
| | CD8T- | αGPC3- | αGPC3- | CAR + |
| Date | z-CAR | CD30-CSR | CD28-CSR | CD28-CSR |
| E1D5 | 210 | 215.4 | 327.5 | 0.66 |
| E2D5 | 68 | 3 | 44 | 0.07 |
| E3D5 | 222.5 | 272.7 | 323.6 | 0.84 |

TABLE 3D
LAG3 Expression Levels on Receptor⁺ T Cells

| | LAG3 Expression Level | | | Ratio of | |
|---|---|---|---|---|---|
| | on 2^{nd}-gen CAR⁺ CD4⁺ | | | LAG3 | Ratio of |
| | T Cells (MFI) | | | Expression | LAG3 |
| | | αAFP- | αAFP- | Levels | Expression |
| | | CD28z- | CD28z- | CAR + | Levels |
| | αAFP- | CAR + | CAR + | CD30-CSR/ | CAR + |
| | CD28z- | αGPC3- | αGPC3- | CAR + | CD30- |
| Date | CAR | CD30-CSR | CD28-CSR | CD28-CSR | CSR/CAR |
| E1D5 | 593 | 443 | 709 | 0.62 | 0.75 |
| E2D5 | 355.1 | 163 | 315.98 | 0.52 | 0.46 |
| E3D5 | 523 | 476 | 557 | 0.85 | 0.91 |

TABLE 4
TIGIT Expression Levels on Receptor⁺ T Cells

| | TIGIT Expression Level on 1^{st}- | | Ratio of TIGIT |
|---|---|---|---|
| | gen CAR⁺ Total T Cells | | Expression |
| | αAFP-CD8T- | αAFP-CD8T- | Levels CAR + |
| | z-CAR + | z-CAR + | CD30-CSR/ |
| | αGPC3- | αGPC3- | CAR + |
| Date | CD30-CSR | CD28-CSR | CD28-CSR |
| E1D3 | 1161 | 1394 | 0.83 |
| E1D5 | 1378 | 1441 | 0.96 |
| E2D3 | 1012 | 1754 | 0.58 |
| E2D5 | 1627 | 2272 | 0.72 |
| E3D3 | 990 | 1677 | 0.59 |
| E3D5 | 867 | 1012 | 0.86 |
| E4D2 | 2117 | 3275 | 0.65 |
| E4D5 | 751 | 1438 | 0.52 |
| E5D2 | 1277 | 2095 | 0.61 |
| E5D5 | 785 | 1178 | 0.67 |

### Example 14—Development and Maintenance of Memory Cells from Anti-AFP/MHC CAR+Anti-GPC3-CSR T Cells

[0407] This example shows that CAR+CD30-CSR T cells developed into and maintained a high memory T cell population after target stimulation, including central memory and effector memory T cells. To determine the effect of expressing CAR+CD30-CSR on T cells' ability to develop into and maintain memory T cells as compared to expressing CAR only or CAR+CD28-CSR, we measured the cell surface expression of memory T cell markers CCR7 and CD45RA. As known in the field, T cells with high CCR7 expression levels and low CD45RA expression levels are considered as central memory T cells, T cells with low CCR7 and low CD45RA expression levels are effector memory T cells, T cells with low CCR7 and high CD45RA expression levels are effector T cells, while T cells with high CCR7 and high CD45RA are naïve T cells which are the initial type of T cells before target/antigen challenge/recognition (Eur J Immunol. 2013 November; 43(11):2797-809. doi: 10.1002/eji.201343751. Epub 2013 Oct. 30. The who's who of T-cell differentiation: human memory T-cell subsets. Mahnke Y D1, Brodie T M, Sallusto F, Roederer M, Lugli E.). When in response to antigen encounter, naïve T cells proliferate and differentiate into effector cells, most of which carry out the job of destroying targets and then die, while a small pool of T cells ultimately develops into long-lived memory T cells which can store the T cell immunity against the specific target. Among the memory T cells, the central memory T cells were found to have longer lives than effector memory T cells and be capable of generating effector memory T cells, but not vice versa. Therefore, the ability to develop into and maintain memory T cells, especially central memory T cells, is an important and desired feature for potentially successful T cell therapies. Primary T cells were mocked transduced or transduced with vectors encoding various CAR constructs. The effector cells were transduced with vectors encoding: 1^{st} generation CAR constructs: (1) anti-AFP-CD8T-z-CAR (SEQ ID NO:1); (2) anti-AFP-CD8T-z-CAR+anti-GPC3-CD28-CSR (SEQ ID NO:1+SEQ ID NO:14); or (3) anti-AFP-CD8T-z-CAR+anti-GPC3-CD30-CSR (SEQ ID NO:1+SEQ ID NO:13); or 2^{nd} generation CAR constructs: (1) anti-AFP-CD28z-CAR (SEQ ID NO:7); (2) anti-AFP-CD28z-CAR+anti-GPC3-CD28-CSR (SEQ ID NO:7+SEQ ID NO:14); or (3) anti-AFP-CD28z-CAR+anti-GPC3-CD30-CSR (SEQ ID NO:7+SEQ ID NO:13) for 7-9 days. The effector cells were normalized to 35% receptor⁺ based on AFP158 tetramer staining.

[0408] The effector cells expressing 1^{st} generation or 2^{nd} generation CAR constructs alone (anti-AFP-CD8T-z-CAR or anti-AFP-CD28z-CAR) were incubated with HepG2 target cells at an E:T ratio of 2:1 (100,000 receptor⁺ T cells and 50,000 HepG2 cells in each well on a 96-well plate) for 7 days. The cells were then rechallenged with 100,000 HepG2 cells per well every 7 days.

[0409] The effector cells expressing CAR+CSR constructs were incubated with HepG2 target cells at an E:T ratio of 1:2 (25,000 receptor⁺ T cells and 50,000 HepG2 cells in each well) for 7 days. The cells were then rechallenged with 100,000 HepG2 cells per well every 7 days.

[0410] Each different T cell and target cell mixture sample was made in replicates to ensure at least one mixture to be available for quantification on each selected day. The CAR or CAR+CSR effector and target cell mixtures were diluted 1:6 before the fourth and fifth target cell engagement (E4 and E5) to avoid the overcrowdedness of T cells due to the significant T cell expansion, so that only one sixth of the previously remaining cells were rechallenged with 100,000 HepG2 cells.

[0411] On selected days after each target cell engagement, the entire cell mixture in a well from each sample was stained with antibodies against CCR7 and CD45RA and analyzed by flow cytometry. Receptor⁺ T cell numbers were counted, and cells were grouped into various T cell types based on their CCR7 and CD45RA expression levels: central memory T cells (CD45RA⁻ CCR7⁺), effector memory T cells (CD45RA⁻ CCR7⁻), effector T cells (CD45RA⁺ CCR7⁻), and naïve T cells (CD45RA⁺ CCR7⁺). Percentages of various types of T cells among the total number of receptor⁺ T cells were calculated. In some experiments, the cells were also stained with antibodies against CD8 or CD4 to determine the CD8-CD4 characteristics of the counted T cells.

[0412] The results of central memory T cell counts of total receptor⁺ T cells (including CD8⁺ and CD4⁺ T cells) as well as ratios of memory T cell counts of the CAR+CD30-CSR T cells over those of CAR+CD28-CSR or CAR alone T cells are shown in Tables 5-7. Tables 5 and 6 show central memory T cell counts of 1^{st}-generation CAR⁺ T cells expressing αAFP-CD8T-z-CAR alone or also expressing CSR (αGPC3-CD28-CSR or αGPC3-CD30-CSR). The CAR and CSR co-expressed in the CAR+CSR T cells of Table 5 were encoded on two separate vectors, while the CAR and CSR of Table 6 were encoded on one vector. Table 7 shows central memory T cell counts of 2^{nd}-generation CAR⁺ T cells expressing αAFP-CD28z-CAR alone or also expressing CSR (αGPC3-CD28-CSR or αGPC3-CD30-CSR). The 2^{nd}-gen CAR and CSR co-expressed in all the experiments disclosed in this Example, including that of Table 7, were encoded on two separate vectors. The results in Tables 5-7 show that, surprisingly, expressing CAR+CD30-CSR resulted in many more central memory T cells than expressing CAR alone or CAR+CD28-CSR at almost all timepoints, especially at extended times after engagement with target cells (e.g., 7 days after the 1^{st} engagement and starting from the 2^{nd} engagement).

TABLE 5
Central Memory T Cell Counts of 1^{st}-generation CAR⁺ T Cells with
CAR and CSR Encoded on Two Separate Vectors.

| | | αAFP- | αAFP- | Ratio of Central | Ratio of |
|---|---|---|---|---|---|
| | | CD8T- | CD8T-z- | Memory T Cell | Central |
| | | z-CAR + | CAR + | Counts CAR + | Memory T |
| | αAFP- | αGPC3- | αGPC3- | CD30-CSR/ | Cell Counts |
| | CD8T- | CD30- | CD28- | CAR + | CAR + CD30- |
| Date | z-CAR | CSR | CSR | CD28-CSR | CSR/CAR |
| E1D3 | 1,657 | 10,543 | 9,359 | 1.13 | 6.36 |
| E1D5 | 1,721 | 14,425 | 12,041 | 1.20 | 8.38 |
| E1D7 | 1,486 | 29,757 | 7,503 | 3.97 | 20.02 |
| E2D3 | 959 | 45,048 | 23,519 | 1.92 | 46.97 |
| E2D5 | 508 | 57,737 | 10,470 | 5.51 | 113.66 |
| E2D7 | 1,869 | 53,986 | 25,167 | 2.15 | 28.88 |
| E3D3 | 109 | 19,674 | 7,430 | 2.65 | 180.50 |
| E3D5 | 609 | 35,055 | 5,088 | 6.89 | 57.56 |
| E4D2^{a} | 14 | 2,075 | 376 | 5.52 | 148.21 |
| E4D5^{a} | 16 | 13,538 | 1,368 | 9.90 | 846.13 |
| E4D7^{a} | 15 | 8,059 | 2,759 | 2.92 | 537.27 |

^{a}The CAR or CAR + CSR effector and target cell mixtures were diluted 1:6 before the fourth target cell engagement (E4).

TABLE 6
Central Memory T Cell Counts of 1^{st}-generation CAR⁺ T Cells
with CAR and CSR Encoded on One Vector.

| | | | Ratio of Central |
|---|---|---|---|
| | | | Memory |
| | αAFP-CD8T-z- | αAFP-CD8T-z- | T Cell Counts |
| | CAR + αGPC3- | CAR + αGPC3- | CAR + CD30-CSR/ |
| Date | CD30-CSR | CD28-CSR | CAR + CD28-CSR |
| E1D3 | 13,558 | 9,882 | 1.37 |
| E1D5 | 22,374 | 14,575 | 1.54 |
| E1D7 | 11,741 | 6,942 | 1.69 |
| E2D3 | 49,009 | 26,084 | 1.88 |
| E2D5 | 38,242 | 14,120 | 2.71 |
| E2D7 | 61,612 | 28,202 | 2.18 |
| E3D3 | 23,571 | 6,150 | 3.83 |
| E3D5 | 26,626 | 10,014 | 2.66 |
| E4D2^{a} | 6,048 | 649 | 9.32 |
| E4D5^{a} | 22,747 | 2,061 | 11.04 |
| E4D7^{a} | 19,363 | 1,681 | 11.52 |

^{a}The CAR or CAR + CSR effector and target cell mixtures were diluted 1:6 before the fourth target cell engagement (E4).

TABLE 7
Central Memory T Cell Counts of 2^{nd}-generation CAR⁺ T Cells
with CAR and CSR Encoded on Two Separate Vectors.

| | | αAFP- | αAFP- | Ratio of Central | |
|---|---|---|---|---|---|
| | | CD28z- | CD28z- | Memory T Cell | |
| | | CAR + | CAR + | Counts | Ratio of Central |
| | αAFP- | αGPC3- | αGPC3- | CAR + CD30- | Memory T Cell |
| | CD28z- | CD30- | CD28- | CSR/CAR + | Counts CAR + |
| Date | CAR | CSR | CSR | CD28-CSR | CD30-CSR/CAR |
| E1D3 | 11684 | 7756 | 3684 | 2.11 | 0.66 |
| E1D5 | 1317 | 14032 | 15872 | 0.88 | 10.65 |
| E1D7 | 781 | 13859 | 7419 | 1.87 | 17.75 |
| E2D3 | 940 | 36436 | 22227 | 1.64 | 38.76 |
| E2D5 | 1153 | 49787 | 29493 | 1.69 | 43.18 |
| E2D7 | 600 | 49888 | 16122 | 3.09 | 83.15 |
| E3D3 | 20 | 24263 | 7132 | 3.40 | 1213.15 |
| E3D5 | 57 | 25743 | 11848 | 2.17 | 451.63 |
| E4D2^{a} | 6 | 8246 | 2353 | 3.50 | 1374.33 |
| E4D5^{a} | 30 | 25570 | 2445 | 10.46 | 852.33 |
| E5D2^{b} | 8 | 16350 | 727 | 22.49 | 2043.75 |
| E5D5^{b} | 7 | 23945 | 2994 | 8.00 | 3420.71 |
| E5D7^{b} | 10 | 4466 | 761 | 5.87 | 446.60 |

^{a}The CAR or CAR + CSR effector and target cell mixtures were diluted 1:6 before the fourth target cell engagement (E4).
^{b}The CAR or CAR + CSR effector and target cell mixtures were diluted 1:6 again before the fifth target cell engagement (E5).

[0413] In addition to T cell counts, percentages of central memory T cells among the total number of receptor T cells were calculated and shown in Tables 8-10, together with ratios of memory T cell percentages of the CAR+CD3-CSR T cells over those of CAR+CD28-CSR T cells. The T cells whose percentage data are shown in these tables were the same T cells whose cell count data are shown in Tables 5-7.

TABLE 8
Central Memory T Cell Percentages among 1^{st}-generation CAR⁺ T
Cells Expressing CAR and CSR Encoded on Two Separate Vectors.

| | | | Ratio of Central |
|---|---|---|---|
| | | | Memory T |
| | aAFP-CD8T- | aAFP-CD8T- | Cell Percentages |
| | z-CAR + aGPC3- | z-CAR + aGPC3- | CAR + CD30-CSR/ |
| Date | CD30-CSR | CD28-CSR | CAR + CD28-CSR |
| E1D3 | 22.6 | 16.4 | 1.38 |
| E1D5 | 43 | 31.3 | 1.37 |
| E1D7 | 38.7 | 37.4 | 1.03 |
| E2D3 | 34 | 27.8 | 1.22 |
| E2D5 | 53.6 | 40.6 | 1.32 |
| E2D7 | 64.7 | 39.3 | 1.65 |
| E3D3 | 25.4 | 9.37 | 2.71 |
| E3D5 | 35.4 | 21.9 | 1.62 |
| E4D2 | 16.5 | 6.63 | 2.49 |
| E4D5 | 17.6 | 10.1 | 1.74 |
| E4D7 | 39.7 | 28.8 | 1.38 |

TABLE 9
Central Memory T Cell Percentages among 1^{st}-generation CAR⁺ T
Cells Expressing CAR and CSR Encoded on One Vector.

| | | | Ratio of Central |
|---|---|---|---|
| | | | Memory T |
| | aAFP-CD8T- | aAFP-CD8T- | Cell Percentages |
| | z-CAR + aGPC3- | z-CAR + aGPC3- | CAR + CD30-CSR/ |
| Date | CD30-CSR | CD28-CSR | CAR + CD28-CSR |
| E1D3 | 38 | 18.8 | 2.02 |
| E1D5 | 48.5 | 32.9 | 1.47 |
| E1D7 | 55.4 | 31.3 | 1.77 |
| E2D3 | 37.4 | 22.8 | 1.64 |
| E2D5 | 57.2 | 31.2 | 1.83 |
| E2D7 | 63.5 | 38.4 | 1.65 |
| E3D3 | 27.8 | 11.3 | 2.46 |
| E3D5 | 38.4 | 37.1 | 1.04 |
| E4D2 | 15.7 | 5.01 | 3.13 |
| E4D5 | 26.7 | 9.77 | 2.73 |
| E4D7 | 53.3 | 25.6 | 2.08 |

TABLE 10
Central Memory T Cell Percentages among 2^{nd}-generation CAR⁺ T Cells
Expressing CAR and CSR Encoded on Two Separate Vectors.

| | | | Ratio of Central Memory T |
|---|---|---|---|
| | αAFP-CD28z- | αAFP-CD28z- | Cell Percentages |
| | CAR + αGPC3- | CAR + αGPC3- | CAR + CD30-CSR/ |
| Date | CD30-CSR | CD28-CSR | CAR + CD28-CSR |
| E1D3 | 18.3 | 24.1 | 0.76 |
| E1D5 | 42.4 | 24.1 | 1.76 |
| E1D7 | 47.4 | 33.4 | 1.42 |
| E2D3 | 34.4 | 18.1 | 1.90 |
| E2D5 | 59 | 24.3 | 2.43 |
| E2D7 | 60.7 | 23 | 2.64 |
| E3D3 | 32.1 | 13.9 | 2.31 |
| E3D5 | 39.3 | 16.3 | 2.41 |
| E4D2 | 17.7 | 5.12 | 3.46 |
| E4D5 | 23 | 7.42 | 3.10 |
| E5D2 | 30.5 | 9.03 | 3.38 |
| E5D5 | 40.4 | 7.27 | 5.56 |
| E5D7 | 20.8 | 8.72 | 2.39 |

[0414] These surprising results show that T cells expressing CAR+CD30-CSR were able to develop into and maintain high numbers and high percentages of central memory T cells upon engagement with target calls, higher than T cells expressing CAR alone or CAR+CD28-CSR, making the CAR+CD30-CSR T cell platform a potentially successful T cell therapy platform.

[0415] In addition to determining the total central memory receptor⁺ T cell counts and their percentages among all receptor⁺ T cells, the same T cell-target cell mixture samples were also stained with antibodies against CD8, in order to determine the numbers of CD8⁺ receptor⁺ central memory T cells and calculate the percentages of central memory T cells among CD8⁺ receptor⁺ T cells. The results are shown in Tables 11-16, together with ratios of memory T cell counts or percentages of the CAR+CD30-CSR T cells over those of CAR+CD28-CSR or CAR alone T cells.

TABLE 11
CD8⁺ Central Memory T Cell Counts of 1^{st}-generation CAR⁺ T Cells with CAR
and CSR Encoded on Two Separate Vectors.

| | | | | | Ratio of |
|---|---|---|---|---|---|
| | | | | Ratio of Central | Central |
| | | aAFP-CD8T- | aAFP-CD8T- | Memory T Cell | Memory T |
| | aAFP- | z-CAR + | Z-CAR + | Counts | Cell Counts |
| | CD8T-Z- | aGPC3- | aGPC3- | CAR + CD30-CSR/ | CAR + CD30- |
| Date | CAR | CD30-CSR | CD28-CSR | CAR + CD28-CSR | CSR/CAR |
| E1D3 | 762 | 2,395 | 2,376 | 1.01 | 3.14 |
| E1D5 | 1,297 | 7,707 | 4,559 | 1.69 | 5.94 |
| E1D7 | 394 | 15,043 | 4,049 | 3.72 | 38.18 |
| E2D3 | 114 | 17,183 | 9,397 | 1.83 | 150.73 |
| E2D5 | 231 | 34,106 | 5,350 | 6.37 | 147.65 |
| E2D7 | 299 | 47,880 | 18,983 | 2.52 | 160.13 |
| E3D3 | 14 | 8,937 | 2,655 | 3.37 | 638.36 |
| E3D5 | 46 | 16,453 | 1,986 | 8.28 | 357.67 |
| E4D2 | 0 | 666 | 91 | 7.32 | >666.00 |
| E4D5 | 0 | 6,624 | 651 | 10.18 | >6624.00 |
| E4D7 | 1 | 7,142 | 1,057 | 6.76 | 7142.00 |

TABLE 12
CD8⁺ Central Memory T Cell Counts of l^{st}-generation CAR⁺ T Cells
with CAR and CSR Encoded on One Vector.

| | | | Ratio of Central |
|---|---|---|---|
| | | | Memory T Cell |
| | aAFP-CD8T-z- | aAFP-CD8T-z- | Counts |
| | CAR + aGPC3- | CAR + aGPC3- | CAR + CD30-CSR/ |
| Date | CD30-CSR | CD28-CSR | CAR + CD28-CSR |
| E1D3 | 4,178 | 2,740 | 1.52 |
| E1D5 | 10,332 | 5,291 | 1.95 |
| E1D7 | 6,157 | 4,355 | 1.41 |
| E2D3 | 21,963 | 14,518 | 1.51 |
| E2D5 | 21,292 | 8,567 | 2.49 |
| E2D7 | 46,229 | 20,347 | 2.27 |
| E3D3 | 9,296 | 2,536 | 3.67 |
| E3D5 | 11,429 | 1,281 | 8.92 |
| E4D2 | 1,265 | 113 | 11.19 |
| E4D5 | 14,457 | 879 | 16.45 |
| E4D7 | 12,452 | 669 | 18.61 |

TABLE 13
CD8⁺ Central Memory T Cell Counts of 2^{nd}-generation CAR⁺ T Cells with CAR
and CSR Encoded on Two Separate Vectors.

| | | | | | Ratio of |
|---|---|---|---|---|---|
| | | | | | Central |
| | | | | Ratio of Central | Memory T |
| | | αAFP-CD28z- | αAFP-CD28z- | Memory T Cell | Cell |
| | αAFP- | CAR + | CAR + | Counts | Counts |
| | CD28z- | αGPC3-CD30- | αGPC3-CD28- | CAR + CD30-CSR/ | CAR + CD30- |
| Date | CAR | CSR | CSR | CAR + CD28-CSR | CSR/CAR |
| E1D3 | 2955 | 3782 | 1731 | 2.18 | 1.28 |
| E1D5 | 1155 | 7604 | 7107 | 1.07 | 6.58 |
| E1D7 | 361 | 7987 | 3047 | 2.62 | 22.12 |
| E2D3 | 587 | 17883 | 8676 | 2.06 | 30.47 |
| E2D5 | 853 | 23007 | 13476 | 1.71 | 26.97 |
| E2D7 | 409 | 33419 | 10986 | 3.04 | 81.71 |
| E3D3 | 10 | 12673 | 2968 | 4.27 | 1267.30 |
| E3D5 | 60 | 14446 | 4819 | 3.00 | 240.77 |
| E4D2 | 1 | 2676 | 758 | 3.53 | 2676.00 |
| E4D5 | 0 | 16709 | 1248 | 13.39 | >16709.00 |
| E5D2 | 0 | 10885 | 244 | 44.61 | >10885.00 |
| E5D5 | 0 | 17829 | 1045 | 17.06 | >17829.00 |
| E5D7 | 0 | 3390 | 214 | 15.84 | >3390.00 |

TABLE 14
Central Memory T Cell Percentages among l^{st}-generation CD8⁺ CAR⁺
T Cells Expressing CAR and CSR Encoded on Two Separate Vectors.

| | | | Ratio of Central |
|---|---|---|---|
| | | | Memory T Cell |
| | aAFP-CD8T-z- | aAFP-CD8T-z- | Percentages |
| | CAR + aGPC3- | CAR + aGPC3- | CAR + CD30-CSR/ |
| Date | CD30-CSR | CD28-CSR | CAR + CD28-CSR |
| E1D3 | 11 | 7.77 | 1.42 |
| E1D5 | 34.2 | 18.8 | 1.82 |
| E1D7 | 28.6 | 22.8 | 1.25 |
| E2D3 | 23.7 | 18.4 | 1.29 |
| E2D5 | 47.5 | 29.2 | 1.63 |
| E2D7 | 59.3 | 31.3 | 1.89 |
| E3D3 | 18.6 | 4.71 | 3.95 |
| E3D5 | 27.2 | 9.12 | 2.98 |
| E4D2 | 8.58 | 2.32 | 3.70 |
| E4D5 | 13.9 | 5.03 | 2.76 |
| E4D7 | 36.2 | 13.5 | 2.68 |

TABLE 15
Central Memory T Cell Percentages among regeneration CD8⁺ CAR⁺
T Cells Expressing CAR and CSR Encoded on One Vector.

| | | | Ratio of Central |
|---|---|---|---|
| | | | Memory T Cell |
| | aAFP-CD8T-z- | aAFP-CD8T-z- | Percentages |
| | CAR + aGPC3- | CAR + aGPC3- | CAR + CD30-CSR/ |
| Date | CD30-CSR | CD28-CSR | CAR + CD28-CSR |
| E1D3 | 27.5 | 11.4 | 2.41 |
| E1D5 | 42 | 20.9 | 2.01 |
| E1D7 | 44 | 23.6 | 1.86 |
| E2D3 | 30.2 | 18.9 | 1.60 |
| E2D5 | 50.3 | 24.6 | 2.04 |
| E2D7 | 58 | 32.3 | 1.80 |
| E3D3 | 20.9 | 7.33 | 2.85 |
| E3D5 | 31.7 | 9.11 | 3.48 |
| E4D2 | 8.13 | 1.56 | 5.21 |
| E4D5 | 24.9 | 4.96 | 5.02 |
| E4D7 | 49 | 14.8 | 3.31 |

TABLE 16
Central Memory T Cell Percentages among 2^{nd}-generation CD8⁺ CAR⁺
T Cells Expressing CAR and CSR Encoded on Two Separate Vectors.

| | | | Ratio of Central |
|---|---|---|---|
| | | | Memory T Cell |
| | αAFP-CD28z- | αAFP-CD28z- | Percentages |
| | CAR + αGPC3- | CAR + αGPC3- | CAR + CD30-CSR/ |
| Date | CD30-CSR | CD28-CSR | CAR + CD28-CSR |
| E1D3 | 13 | 17.3 | 0.75 |
| E1D5 | 38.5 | 18.9 | 2.04 |
| E1D7 | 40.5 | 21.7 | 1.87 |
| E2D3 | 27.2 | 11.1 | 2.45 |
| E2D5 | 50.6 | 18.2 | 2.78 |
| E2D7 | 54.7 | 19 | 2.88 |
| E3D3 | 25.8 | 8.4 | 3.07 |
| E3D5 | 31.3 | 7.41 | 4.22 |
| E4D2 | 12.5 | 3.24 | 3.86 |
| E4D5 | 20.3 | 3.76 | 5.40 |
| E5D2 | 26 | 4.23 | 6.15 |
| E5D5 | 35.9 | 2.85 | 12.60 |
| E5D7 | 16.4 | 2.04 | 8.04 |

[0416] These surprising results show that CD8⁺ cytotoxic T cells expressing CAR+CD30-CSR were able to develop into and maintain high numbers and high percentages of central memory T cells, higher than CD8⁺ T cells expressing CAR alone or CAR+CD28-CSR, making the CAR+CD30-CSR T cell platform a great T cell therapy platform especially for target cell (including cancer cell) killing and cancer treatment.

[0417] From this experiment, it was also found that, at least with the 1^{st}-generation CAR, co-expressing CD30-CSR also resulted in more effector memory T cells (in addition to more central memory T cells) than expressing CAR alone or co-expressing CD28-CSR (data not shown), which are also helpful in T cell therapies.

### Example 15—In Vivo Tumor Infiltration by Anti-AFP-CAR+Anti-GPC3-CSR T Cells

[0418] About 10⁷ HepG2 tumor cells were implanted subcutaneously in NSG mice and allowed to form a solid tumor mass 150 mm³. In one experiment, 5×10⁶ mock-transduced T cells or CAR⁺ T cells expressing (1) αAFP-CD28z-CAR (SEQ ID NO:7); (2) αAFP-CD28z-CAR+αGPC3-CD28-CSR (SEQ ID NO:7+SEQ ID NO:14); or (3) αAFP-CD28z-CAR+αGPC3-CD30-CSR (SEQ ID NO:7+SEQ ID NO:13) were injected i.v. into the tumor bearing mice, with three mice in each sample group. Three weeks after T-cell dosing, the mice were sacrificed and tumors removed, fixed, and sectioned onto slides. Tumor sections were stained with anti-CD3 antibody to visualize the T cells that were present within the solid tumor. Representative images of tumor sections from each sample group are shown in FIG. 4. Quantification of the number of CD3⁺ cells (T cells) as well as that of all cells was done on four representative sections of each mouse's tumors, and the mean T cell % (% of all cells that were CD3⁺ cells) for each CAR T sample group was calculated and shown in FIG. 5 and Table 17, as an indicator of tumor infiltration ability of the CAR T cells. FIGS. 4 and 5 as well as Table 17 show that, surprisingly, αAFP-CD28z-CAR+αGPC3-CD30-CSR T cells had significantly higher in vivo tumor infiltration/penetration rates/levels/capabilities (i.e., higher % CD3⁺ cells among all cells) than corresponding CAR T cells without CSR or corresponding CAR+CD28-CSR T cells. Table 17 further shows the ratio of % of CAR+CD30-CSR T cells (CD3⁺) among all cells over % of CAR+CD28-CSR or CAR alone T cells among all cells in the tumor samples.

TABLE 17
Tumor Infiltration by Anti-AFP CAR and Anti-AFP-CAR + Anti-GPC3-CSR T
Cells.

| Mean % CD3⁺ Cells among All Cells in | | | | |
|---|---|---|---|---|
| Tumor Samples | | | Ratio of CD3⁺ Cell | Ratio of CD3⁺ Cell |
| αAFP- | αAFP-CD28z- | αAFP-CD28z- | Percentages | Percentages |
| CD28z- | CAR + αGPC3- | CAR + αGPC3- | CAR + CD30-CSR/ | CAR + CD30-CSR/ |
| CAR | CD30-CSR | CD28-CSR | CAR + CD28-CSR | CAR |
| 2.0% | 28.3% | 17.2% | 1.65 | 14.10 |

### Example 16—In Vivo Tumor Infiltration by Anti-GPC3-CAR+Anti-GPC3-CSR T Cells

[0419] Following a similar protocol as described in Example 15, including using HepG2 tumor cells to implant NSG mice, the tumor infiltration abilities of αGPC3-CD28z-CAR and αGPC3-CD28z-CAR+αGPC3-CD30-CSR T cells were also tested in vivo. Such CAR T cells were generated by transducing primary T cells with lentiviral vectors encoding αGPC3-CD28z-CAR or αGPC3-CD28z-CAR+αGPC3-CD30-CSR. The αGPC3-CD30-CSR is identical to the αGPC3-CD30-CSR co-expressed with the αAFP-CD28z-CAR disclosed in the previous examples. The αGPC3 antibody moieties in the CAR and the CSR of these T cells comprise different GPC3-binding sequences as disclosed in the informal sequence listing. 10⁷ HepG2 tumor cells were implanted subcutaneously in NSG mice and allowed to form a solid tumor with a mass of about 250 mm³. 1×10⁷ CAR T cells (50% CAR receptor positive) or 5×10⁶ Mock T cells were injected i.v. into the tumor-bearing mice. Two weeks after T cell dosing, the mice were sacrificed and tumors removed, fixed and sectioned onto slides. Tumor sections were stained with anti-CD3 antibody to visualize the T cells that were present within the solid tumor. Quantification of the numbers of CD3⁺ cells (T cells) and total cells was done using the QuPath software to score the tumor infiltration capability of the T cells (combined tumor penetration and post-penetration T cell proliferation capabilities). Representative images of tumor sections from each sample group are shown in FIG. 6. Quantification of the numbers of T cells and total cells was done on four representative sections of each mouse's tumors, and the mean T cell % (% of all cells that were CD3⁺ cells) for each CAR T sample group was calculated and shown in Table 18. Table 18 further shows the ratio of % of CAR+CD30-CSR T cells among all cells over % of CAR alone T cells among all cells in the tumor samples. FIG. 6 as well as Table 18 show that αGPC3-CD28z-CAR+αGPC3-CD30-CSR T cells had significantly higher in vivo tumor infiltration capability (i.e., higher % CD3⁺ cells among all cells) than corresponding CAR T cells without CSR.

TABLE 18
Tumor Infiltration by Anti-GPC3 CAR and
Anti-GPC3-CAR + Anti-GPC3-CSR T Cells.

| Mean % CD3⁺ Cells among All Cells in | | |
|---|---|---|
| Tumor Samples | | |
| aGPC3- | αGPC3-CD28z-CAR + | Ratio of CD3⁺ Cell Percentages |
| CD28z-CAR | αGPC3-CD30-CSR | CAR + CD30-CSR/CAR |
| 14.8% | 32.3% | 2.18 |

### Example 17—Additional In Vitro and In Vivo Assays of Anti-GPC3-CAR T Cells Expressing Anti-GPC3-CD30-CSR vs. Anti-GPC3-CD30T-CD28-CSR In Vitro Tumor Cell Killing Assay

[0420] An LDH-based assay comparing the short-term killing ability of various anti-GPC3-CAR T cells was performed using the method described in Examples 1A and 1B. Effector cell groups used in this example include the following. These CAR T cells were generated by transducing primary T cells (from a different donor than the source of the primary T cells used in Example 16) with lentiviral vectors encoding the following CAR or CAR+CSR. Group 1) CAR T cells without CSR: anti-GPC3-CD28z-CAR; Group 2) CAR T cells with a CSR that comprises CD30 transmembrane and CD28 intracellular domains: anti-GPC3-CD28z-CAR+anti-GPC3-CD30T-CD28-CSR Group 3) CAR T cells with a CSR that comprises a CD30 transmembrane domain and the intracellular CD30 costimulatory domain (CD30 IC domain): anti-GPC3-CD28z-CAR+anti-GPC3-CD30-CSR.

[0421] Activated effector cells (anti-GPC3-CAR receptor positive T cells) and the target cells (HepG2 cells which are GPC3⁺), with SKHep1 (GPC3⁻) cells as the negative control, were co-cultured at an E:T ratio of 2:1 for 16 hours. Specific killing was determined by measuring LDH activity in culture supernatants. Tumor cytotoxicity was assayed by LDH Cytotoxicity Assay (Promega). The result showed that all three anti-GPC3 CAR T cell groups displayed significant and comparable GPC3-specific killing efficacies (all about 60% specific lysis).

[0422] In Vivo Tumor Infiltration Assay

[0423] Further, following a similar protocol to those described in Examples 8A, 8B, 15, and 16, the three different CAR T effector cell groups described above in Example 17 (A) were tested for in vivo tumor infiltration capabilities. 5×10⁶ HepG2 tumor cells were implanted subcutaneously in each NSG mouse and allowed to form a solid tumor with a mass of about 150 mm³. When tumors reached the appropriate size, animals were assigned to experimental groups, with three mice tested per group. 1×10⁷ total T cells (50% CAR receptor positive for CAR T cell groups) were injected i.v. into the tumor bearing mice. Animals were sacrificed when their tumor growth plateaued 10 days after T-cell dosing. At this time the mice were sacrificed, and tumors were removed, fixed and sectioned onto slides. Immunohistochemistry was performed on tumor sections to stain for CD3. The CD3-positive and CD3-negative cells in these sections were quantified with an automated immunohistochemistry imager in order to determine the fraction of tumor mass infiltrated by T cells. Quantification of the number of CD3⁺ cells (T cells) as well as that of all cells was done on a representative section of each mouse's tumor with total cell numbers ranging from over 55,000 to almost 700,000 per section. The mean T cell % (% of all cells that were CD3⁺ cells) for each CAR T sample group was calculated and shown in FIG. 7 and Table 19. FIG. 7 as well as Table 19 show that αGPC3-CD28z-CAR+αGPC3-CD30-CSR T cells (“Group 3”) had significantly higher in vivo tumor infiltration capability (i.e., higher % CD3⁺ cells among all cells) than corresponding CAR T cells without CSR (“Group 1”) or with αGPC3-CD30T-CD28-CSR (“Group 2”).

TABLE 19
Tumor Infiltration by Anti-GPC3 CAR, Anti-GPC3-CAR + Anti-GPC3-CD30-CSR,
and Anti-GPC3-CAR + Anti-GPC3-CD30T-CD28-CSR T Cells.

| Mean % CD3⁺ Cells among All Cells in | | | | |
|---|---|---|---|---|
| Tumor Samples | | | | |
| | αGPC3- | αGPC3-CD28z- | Ratio of CD3 + | Ratio of CD3 + |
| αGPC3- | CD28z-CAR + | CAR + αGPC3- | Cell Percentages | Cell Percentages |
| CD28z- | αGPC3-CD30- | CD30T-CD28- | CAR + CD30-CSR/ | CAR + CD30-CSR/ |
| CAR | CSR | CSR | CAR + CD28-CSR | CAR |
| 66.7% | 81.7% | 61.7% | 1.32 | 1.22 |

[0424] The result shows that in vivo tumor infiltration ability (combined tumor penetration and post-penetration T cell proliferation capabilities) was the highest with αGPC3-CD28z-CAR+αGPC3-CD30-CSR T cells, which has CD30 TM and CD30 IC domains, surprisingly much higher than αGPC3-CD28z-CAR+αGPC3-CD30T-CD28-CSR T cells, which only differs from the CAR+CD30-CSR T cells in the intracellular region, suggesting that the CD30 IC costimulatory domain played an important role in the high in vivo tumor infiltration capability of the CAR+CD30-CSR T cells.

[0425] In Vivo T Cell Expansion/Proliferation in Terminal Blood Samples

[0426] In order to test the in vivo cell expansion/proliferation capability of αGPC3-CD28z-CAR+αGPC3-CD30T-CD28-CSR T cells, terminal blood samples were drawn from the mice used in the in vivo tumor infiltration assay disclosed in Example 17 (B) when the mice were sacrificed. The concentrations of CAR receptor⁺ CD3⁺ cells and total CD3⁺ cells (numbers of cells per mL blood) were determined, and the result is shown in Table 20. Table 20 further shows the ratios of peripheral blood concentration of CAR+CD30-CSR T cells (CD3⁺) over the concentration of CAR+CD28-CSR or CAR alone T cells.

TABLE 20
In Vivo Cell Expansion/Proliferation of Anti-GPC3 CAR, Anti-GPC3-CAR + Anti-
GPC3-CD30-CSR, and Anti-GPC3-CAR + Anti-GPC3-CD30T-CD28-CSR T Cells.

| | Mean Cell Concentration | | | | |
|---|---|---|---|---|---|
| | (Number of Cells per mL Blood) | | | Ratio of Cell | |
| | | | αGPC3- | Concentration | |
| | | αGPC3- | CD28z-CAR + | CAR + CD30- | Ratio of Cell |
| Type of | αGPC3- | CD28z- | αGPC3- | CSR/ | Concentration |
| Cells | CD28z- | CAR + αGPC3- | CD30T- | CAR + CD28- | CAR + CD30- |
| Quantified | CAR | CD30-CSR | CD28-CSR | CSR | CSR/CAR |
| CAR⁺ | 81.3 | 128.7 | 43.6 | 2.95 | 1.58 |
| CD3⁺ | | | | | |
| Cells | | | | | |
| Total | 755.3 | 1,724.2 | 381.8 | 4.52 | 2.28 |
| CD3⁺ | | | | | |
| Cells | | | | | |

[0427] The result shows that in vivo cell expansion/proliferation capability was the highest with αGPC3-CD28z-CAR+αGPC3-CD30-CSR T cells, which has CD30 TM and CD30 IC domains, surprisingly much higher than αGPC3-CD28z-CAR+αGPC3-CD30T-CD28-CSR T cells, which only differs from the CAR+CD30-CSR T cells in the intracellular region, suggesting that the CD30 IC costimulatory domain played an important role in the high in vivo cell expansion/proliferation capability of the CAR+CD30-CSR T cells.

[0428] In Vivo Memory T Cell Counts of Terminal Blood Samples

[0429] In order to test the in vivo memory T cell generation capability of αGPC3-CD28z-CAR+αGPC3-CD30T-CD28-CSR T cells, terminal blood samples were drawn from the mice used in the in vivo tumor infiltration assay disclosed in Example 17 (B) when the mice were sacrificed. The numbers of central memory T cells (CD45RA⁻ CCR7⁺ T cells, CD8⁺ or CD4⁺) in peripheral blood were determined as described in the examples above, and percentages of central memory T cells among the total T cells were calculated and shown in Table 21. Table 21 further shows the ratios of central memory T cell percentage of CAR+CD30-CSR T cells over that of CAR+CD28-CSR or CAR alone T cells.

TABLE 21
In Vivo Central Memory T Cell Percentages of Anti-GPC3 CAR, Anti-GPC3-
CAR + Anti-GPC3-CD30-CSR, and Anti-GPC3-CAR + Anti-GPC3-CD30T-
CD28-CSR T Cells.

| | Mean Central Memory T Cell Percentage | | | | |
|---|---|---|---|---|---|
| | among All Terminal Blood CAR⁺ CD3⁺ | | | Ratio of Central | |
| | Cells | | | Memory T Cell | Ratio of |
| | | | αGPC3- | Percentages | Central |
| | | αGPC3- | CD28z-CAR + | CAR + CD30- | Memory T Cell |
| Type of | αGPC3- | CD28z-CAR + | αGPC3- | CSR/ | Percentages |
| Cells | CD28z- | αGPC3- | CD30T- | CAR + CD28- | CAR + CD30- |
| Quantified | CAR | CD30-CSR | CD28-CSR | CSR | CSR/CAR |
| CD8⁺ T | 4.7 | 12.7 | 7.9 | 1.60 | 2.69 |
| cells | | | | | |
| CD4⁺ T | 22.6 | 31.3 | 26.8 | 1.17 | 1.38 |
| cells | | | | | |

[0430] The in vivo peripheral blood result shows that both CD8⁺ and CD4⁺ central memory T cell percentages were also the highest with anti-GPC3-CD28z-CAR+anti-GPC3-CD30-CSR T cells, also surprisingly much higher than αGPC3-CD28z-CAR+αGPC3-CD30T-CD28-CSR T cells, which only differs from the CAR+CD30-CSR T cells in the intracellular region, suggesting that the CD30 IC costimulatory domain played an important role in the high in vivo central memory T cell generation capability of the CAR+CD30-CSR T cells.

### Example 18—Multiple In Vitro Assays of Anti-CD19-CAR T Cells Expressing Anti-CD19-CD30-CSR vs. Anti-CD19-CD28-CSR or 41BB-CSR

[0431] Short-Term Killing and IFN-Gamma Production

[0432] Assays comparing the short-term killing ability of the various T cells were performed as in Example 1A using the following constructs:

1^{st} generation constructs used: □

### αCD19-CD8T-z-CAR+αCD19-CD28-CSR; and

### αCD19-CD8T-z-CAR+αCD19-CD30-CSR.

[0433] 2^{nd} generation constructs used:

### αCD19-CD8T-41BBz-CAR+αCD19-CD28T-41BB-CSR; and

### αCD19-CD8T-41BBz-CAR+αCD19-CD28T-CD30-CSR.

[0434] Primary T cells were transduced with a vector encoding each construct. The transduction efficiency was determined and T cells were matched at 40 percent receptor positivity by mixing with mock transduced T-cells. Nalm6 or Raji cells were used at an effector-to-target ratio of 1:1. The release of IFNγ into the media was measured after 72 hours. The IFNγ levels in the culture medium were measured using the Magpix multiplex system (Luminex) with the Bio-plex Pro Human Cytokine 8-plex Assay (BioRad). Assay supernatants from Nalm6 or Raji target reactions were diluted 4-fold. Cytokine concentrations were determined with the standard curve supplied with the BioRad Bio-plex kit.

[0435] The in vitro killing and subsequent increase in cytokine levels was notably greater or comparable using the CAR+CD30-CSR as compared to the CAR+41BB-CSR, with the most dramatic increases observed in the 1^{st} generation CAR-expressing effector T cells using both Nalm6 and Raji cells (FIGS. 8A and 8B). The notable increase in IFNγ release seen with CAR+CD30-CSR when killing Nalm6 or Raji demonstrated that the CAR+CD30-CSR retained its increased cytotoxic signaling potential in an anti-CD19 model.

[0436] Long-Term Killing Assays and Central Memory T Cell Measurements Using 1^{st} Generation CAR+CSR Effector and Nalm6 Target Cells

[0437] Assays comparing the long-term killing ability of the various T cells were performed (see, e.g., Examples s 3A, 3B, and 12 for sample experimental protocol) using 1^{st} generation CAR+CSR-expressing effector cells:

1^{st}-gen CARs used:

### αCD19-CD8T-z-CAR+αCD19-CD28-CSR;

### αCD19-CD8T-z-CAR+αCD19-CD30-CSR.

[0438] The percentage of central memory T cells (Tcm) represents the % Tcm in the population of total receptor⁺ T cells (CD8⁺ T cells and CD4⁺ T cells). The % of central memory T cells was measured during the course of a multiweek assay and a ratio was calculated using the % memory T cells of the CAR+CD30-CSR expressing cells divided by the % Tcm of the CAR+CD28-CSR-expressing effector cells. Table 22 shows that the CAR-CD30-CSR expression induced considerably more central memory T cells to persist and expand over the course of the assay, consistently better than CAR+CD28-CSR cells. The target cells were Nalm6. Representative data is shown.

TABLE 22
Central Memory T Cell Percentages among l^{st}-generation CAR⁺ T Cells
Expressing CAR and CSR

| | % Central Memory T Cells | | Ratio of % Central |
|---|---|---|---|
| | l^{st}-gen αCD19-CD8T- | l^{st}-gen αCD19-CD8T- | Memory T cells |
| | z-CAR + αCD19- | z-CAR + αCD19- | CAR + CD30-CSR/ |
| Date | CD30-CSR | CD28-CSR | CAR + CD28-CSR |
| E1D3 | 30.5 | 7.14 | 4.27 |
| E1D5 | 44.2 | 18.3 | 2.42 |
| E1D7 | 44.3 | 22.1 | 2.00 |
| E2D3 | 36.8 | 16.8 | 1.95 |
| E2D5 | 33.3 | 18.9 | 1.76 |
| E2D7 | 27.3 | 13.6 | 2.01 |
| E3D3 | 29.1 | 9.57 | 3.04 |
| E3D5 | 18.7 | 6.26 | 2.99 |
| E3D7 | 17.3 | 5.62 | 3.08 |
| E4D3 | 26.3 | 6.55 | 4.02 |
| E4D5 | 16.5 | 6.1 | 2.70 |
| E4D7 | 13.7 | 6.04 | 2.27 |

[0439] Assays using Raji cells as the target also showed more Tcm cells were present in the CAR+CD30-CSR population than in the CAR+CD28-CSR population expressed as a percentage of receptor⁺ T cells (CD8⁺ CD4⁺). The % Central Memory T cells in assays with CAR+CD30-CSR-expressing effector cells was appreciably and consistently higher throughout the assay period (data not shown) than effector cells expressing CAR+CD28-CSR.

[0440] Long-Term Killing Assays and Central Memory T cell Measurements using 2^{nd} Generation CAR+CSR Effector Cells and Nalm6 Target Cells

[0441] Constructs used in this example include the following 2^{nd} generation CARs: αCD19-CD8T-41BBz-CAR+αCD19-CD28T-41BB-CSR; αCD19-CD8T-41BBz-CAR+αCD19-CD28T-CD30-CSR.

[0442] The expansion of the target antigen-specific memory T cell component of total T cells (CD4⁺ T cells and CD8⁺ T cells) following Nalm6 target cell engagement was assessed in a long-term assay using 2^{nd} generation CAR effector cells expressing the CAR+CD30-CSR and CAR+41BB-CSR. The ratio of central memory T cell percentages of CAR+CD3-CSR compared to CAR+41BB-CSR was dependably higher during the entire course of the long-term assay. The ratio of percentages of CD8R central memory T cells likewise was consistently greater in CAR+CD3D-CSR-expressing effector cells compared to CAR+41BB-CSR-expressing cells during the same period. All CAR+CSR assays showed robust target cell killing (not shown). Representative data are shown; see Tables 23A and Table 23B.

TABLE 23A
Central Memory T Cell Percentages among 2^{nd}-generation
CAR⁺ T Cells Expressing CAR and CSR

| | % Total Central Memory T Cells | | |
|---|---|---|---|
| | αCD19-CD8T- | αCD19-CD8T- | Ratio of % Central |
| | 41BBz-CAR + | 41BBz-CAR + | Memory T cells |
| | αCD19-CD28T- | αCD19-CD28T- | CAR + CD30-CSR/ |
| Date | CD30-CSR | 41BB-CSR | CAR + 41BB-CSR |
| E1D7 | 48.4 | 44.2 | 1.10 |
| E2D3 | 40 | 33.4 | 1.20 |
| E2D5 | 36.4 | 30.7 | 1.19 |
| E2D7 | 32.6 | 25.8 | 1.26 |
| E3D3 | 32.4 | 21.9 | 1.48 |
| E3D5 | 22.5 | 17.4 | 1.29 |
| E3D7 | 21.6 | 16.5 | 1.31 |
| E4D2 | 27.1 | 13 | 2.08 |
| E4D5 | 20.5 | 9.75 | 2.10 |
| E4D7 | 15.8 | 8.81 | 1.79 |

Table 23B
CD8⁺ Central Memory T Cell Percentages among 2^{nd}-generation
CAR⁺ T Cells Expressing CAR and CSR

| | % CD8⁺ Central Memory T Cells | | Ratio of % |
|---|---|---|---|
| | αCD19-CD8T- | αCD19-CD8T- | CD8⁺ Central |
| | 41BBz-CAR + | 41BBz-CAR + | Memory T cells |
| | αCD19-CD28T- | αCD19-CD28T- | CAR + CD30-CSR/ |
| Date | CD30-CSR | 41BB-CSR | CAR + 41BB-CSR |
| E1D7 | 41.1 | 34.9 | 1.19 |
| E2D3 | 29.3 | 20.8 | 1.41 |
| E2D5 | 23 | 20.6 | 1.12 |
| E2D7 | 24.5 | 19.1 | 1.28 |
| E3D3 | 21.2 | 13.2 | 1.61 |
| E3D5 | 15.4 | 12.7 | 1.21 |
| E3D7 | 17.4 | 13.8 | 1.26 |
| E4D2 | 19.6 | 8.81 | 2.22 |
| E4D5 | 16.4 | 5.78 | 2.84 |
| E4D7 | 11.3 | 5.78 | 1.96 |

[0443] The Raji cell data showed comparable central memory T cell percentages between the CAR+41BB-CSR and the CAR+CD30-CSR populations during the course of the assay.

[0444] Long-Term Killing Assays and Measurement of Total T Cell and Receptor⁺ T Cells Using 2nd-Generation CAR+CSR Effector Cells and Nalm6 as Target Cells

[0445] Constructs used in this example include the following:

2^{nd} generation CARs used:

### αCD19-CD8T-41BBz-CAR+αCD19-CD28T-41BB-CSR;

### αCD19-CD8T-41BBz-CAR+αCD19-CD28T-CD30-CSR.

[0446] The total T cell population, the receptor⁺ component and the target component of T cells was measured during the course of a long-term killing assay using 2^{nd} generation CAR T cells expressing 41BB-CSRs or CD30-CSRs with a Nalm6 target cell population. A comparison of total T cell, Receptor⁺ T cell and target cell numbers showed a consistently greater number of total T cells in the population expressing the CAR+CD30-CSR than in the population expressing the CAR+41BB-CSR. The receptor⁺ component of these T cells was greater for CAR+CD30-CSR-expressing effector population than for CAR+41BB-CSR expressing cells during the final weeks of the assay (E3D5 through E4D7), although in the beginning the levels were comparable in cultures with both CD30-CSR and 41BB-CSR effector cells. Low numbers of target cells were found in both populations during the duration of the assay. The ratio of total T cell counts and receptor⁺ T cell counts comparing CD30-CSR to 41BB-CSR cell numbers showed a consistently greater number of T cells and R⁺ T cells present in CD30-CSR expressing effector cell cultures. Representative data are shown. See Tables 24A and Table 24B.

TABLE 24A
Total T cell counts in using effector cells expressing
CAR + CSRs following Nalm6 target cell engagement

| | | | Ratio of total T |
|---|---|---|---|
| | Total T cell Count | | cell numbers |
| | αCD19-CD8T- | αCD19-CD8T- | CAR + CD28T- |
| | 41BBz-CAR + | 41BBz-CAR + | CD30-CSR/ |
| | αCD19-CD28T- | αCD19-CD28T- | CAR + CD8T- |
| Date | CD30-CSR | 41BB-CSR | 41BB-CSR |
| E3D3 | 143979 | 101433 | 1.42 |
| E3D5 | 124636 | 108033 | 1.15 |
| E3D7 | 130150 | 78410 | 1.66 |
| E4D3 | 95522 | 47447 | 2.01 |
| E4D5 | 70304 | 51440 | 1.37 |
| E4D7 | 63283 | 18642 | 3.39 |

TABLE 24B
Receptor⁺ T cell counts in using effector cells expressing
CAR + CSRs following Nalm6 target cell engagement.

| | | | Ratio of receptor⁺ |
|---|---|---|---|
| | Receptor⁺ T cell Count | | T cell numbers |
| | αCD19-CD8T- | αCD19-CD8T- | CAR + CD28T- |
| | 41BBz-CAR + | 41BBz-CAR + | CD30-CSR/ |
| | αCD19-CD28T- | αCD19-CD8T- | CAR + CD8T- |
| Date | CD30-CSR | 41BB-CSR | 41BB-CSR |
| E3D3 | 84826 | 60487 | 1.40 |
| E3D5 | 55021 | 51949 | 1.06 |
| E3D7 | 55305 | 26833 | 2.06 |
| E4D3 | 46331 | 14076 | 3.29 |
| E4D5 | 22383 | 15050 | 1.49 |
| E4D7 | 28597 | 5402 | 5.29 |

[0447] The data from the Raji target engagement showed similar T cell and receptor⁺ T cell counts during each assay time point, as well as low target cell numbers during the course of the assay (not shown).

[0448] Exhaustion Marker Expression in Long-Term Killing Assays using 1^{st} or 2^{nd} Generation CAR+CSR Effector Cells

[0449] Constructs used in this example include the following 2^{nd} generation CARs in assays measuring PD1 expression levels in Total T cells (CD4⁺ CD8⁺):

### αCD19-CD8T-41BBz-CAR+αCD19-CD28T-41BB-CSR;

### αCD19-CD8T-41BBz-CAR+αCD19-CD28T-CD30-CSR.

[0450] The PD1 exhaustion marker expression was analyzed in long term cultures of CAR+CSR expressing effector cells using both Nalm6 and Raji cells as the target. The PD1 exhaustion marker expression in total T cells and in CD8⁺ T cells following target engagement was lower in CD30-CSR-expressing populations compared to 41BB-CSR-expressing populations during the course of the assay (EID3-E4D7) using Nalm6 or Raji cells as targets. PD1 expression in T cells was measured by flow cytometry and calculating the Mean Fluorescent Intensity (MFI) of PD1. The reduced expression of PD1 in the T cells show that CAR+CD30-CSR expression reduces the deterioration of T cell function when compared to CAR+41BB-CSR expression in long-term assay cultures. See Tables 25A, 25B, 26A, and 26B.

TABLE 25A
PD1 Expression Levels in total T cells following
Nalm6 target cell engagement

| | PD1 Expression Level in 2^{nd}-gen | | Ratio of PD1 |
|---|---|---|---|
| | CAR + CSR Total T Cells (MFI) | | Expression |
| | αCD19-CD8T- | αCD19-CD8T- | Levels |
| | 41BBz-CAR + | 41BBz-CAR + | CAR-CD30- |
| | αCD19-CD28T- | αCD19-CD28T- | CSR/CAR- |
| Date | CD30-CSR | 41BB-CSR | 41BB-CSR |
| E1D3 | 320 | 379 | 0.84 |
| E2D3 | 254 | 304 | 0.84 |
| E3D3 | 298 | 307 | 0.97 |
| E3D5 | 209 | 248 | 0.84 |
| E4D3 | 271 | 333 | 0.81 |
| E4D5 | 187 | 238 | 0.79 |
| E4D7 | 250 | 292 | 0.86 |

TABLE 25B
PD1 Expression Levels in CD8⁺ T cells following
Nalm6 target cell engagement

| | PD1 Expression Level of ^{2nd}-gen | | Ratio of PD1 |
|---|---|---|---|
| | CAR + CSR CD8⁺ T Cells (MFI) | | Expression |
| | αCD19-CD8T- | αCD19-CD8T- | Levels |
| | 41BBz-CAR + | 41BBz-CAR + | CAR-CD30- |
| | αCD19-CD28T- | αCD19-CD28T- | CSR/CAR- |
| Date | CD30-CSR | 41BB-CSR | 41BB-CSR |
| E1D3 | 156 | 213 | 0.73 |
| E2D3 | 188 | 224 | 0.84 |
| E3D3 | 239 | 267 | 0.90 |
| E3D5 | 151 | 207 | 0.73 |
| E4D3 | 172 | 285 | 0.60 |
| E4D5 | 115 | 169 | 0.68 |
| E4D7 | 201 | 240 | 0.84 |

### Example 19—Multiple In Vitro Assays of Anti-ROR1-CAR T Cells Expressing Anti-ROR1-CD28T-CD30-CSR vs. Anti-ROR1-CD28T-41BB-CSR

[0451] This example shows that ROR1-targeting CAR T cells co-expressing an ROR1-targeting CSR comprising a CD30 costimulatory domain killed cancer cells effectively and out-performed corresponding CAR T cells co-expressing a CSR comprising a 4-1BB costimulatory domain in cell exhaustion marker level and central memory T cell measurement assays.

[0452] The two effector cell groups used in this example are the following.

Mock transduced T cells;
αROR1-CD8T-41BBz-CAR+αROR1-CD28T-CD30-CSR T cells (“tCD30”); and
αROR1-CD8T-41BBz-CAR+αROR1-CD28T-41BB-CSR T cells (“t41BB”).

[0453] The anti-ROR1 antigen-binding domains (antibody moieties) of these CAR and CSR comprise the same scFv sequence (SEQ ID NO: 50). These CAR T cells were generated by transducing primary T cells with lentiviral vectors with CAR and CSR encoded on a single vector.

[0454] The target cell lines used in this example are the following, all expressing ROR1 (ROR1⁺).

Jekol (a lymphoma cell line);
RPMI8226 (a multiple myeloma cell line);
MDA-MB-231 (a breast cancer cell line); and
A549, H1975, and H1703 (three different lung cancer cell lines).

[0455] A. Short-Term Killing and Cytokine Production Related to Cancer Cell Killing by Anti-ROR1 CAR+CSR T Cells

[0456] The short-term in vitro target cell killing ability of the two anti-ROR1 CAR+CSR T cell groups was determined as described in Example 1B by measuring the amounts/levels of cytokines released from T cells upon engagement with various target cells. 2×10⁵ CAR⁺ T cells were co-cultured with target cells at an ET ratio of 1:1 for about 16 h. The levels of IFNγ release in the supernatant after co-culture were quantified. The results are shown in FIG. 9, and they indicate that anti-ROR1-CD8T-41BBz-CAR+anti-ROR1-CD28T-CD30-CSR T cells (“tCD30”) had significant ROR1-specific cell killing capability against all six tested cancer cell lines (measured by IFNγ release level) as compared to the mock-transduced T cells, and their cell killing capability is comparable to or somewhat better than that of corresponding CAR T cells co-expressing a CSR comprising a 4-1BB costimulatory domain (“t41BB”).

[0457] B. Long-Term Anti-ROR1 CAR+CSR T Cell and Target Cell Counts After Multi-Week Engagements

[0458] This example shows that in a long-term killing assay, anti-ROR1 CAR+CD30-CSR T cells killed more target cells and mostly survived better than corresponding CAR+41BB-CSR T cells did.

[0459] 10⁵ CAR⁺ (receptor⁺) T cells of the two anti-ROR1 CAR+CSR cell groups as described in this example were first co-cultured/engaged with various target cells at an ET ratio of 1:1 in multiple duplicates. The target cells used in this example (Example 19 B) were MDA-MB-231 (a breast cancer cell line), A549, H1975, and H1703 (lung cancer cell lines), which are all solid tumor cells and adherent cells. Every seven days after the first engagement, the remaining live target cells (adhered to plates) of one sample T cell-target cell mixture per sample group were lysed and stained with crystal violet for total target cell number/mass quantification, while the unlysed samples of each group, including the T cells in culture suspension and the adhered target cells, were re-challenged with 10⁵ fresh target cells every seven days.

[0460] Table 26 shows ratios of remaining target cell number/mass after challenging αROR1-CD8T-41BBz-CAR+αROR1-CD28T-CD30-CSR T cells (“CAR+CD30-CSR”) vs. challenging αROR1-CD8T-41BBz-CAR+αROR1-CD28T-41BB-CSR T cells (“CAR+41BB-CSR”), using various cancer cell lines (H1975, MDA-MB-231, H1703, and A549). Live T cells remaining in each sample group (in culture suspension) were quantified on various days after each target cell engagement using FACS, and the results are shown in FIGS. 10A-10D.

TABLE 26

| | Ratio of Remaining Target Cell Number/Mass | | | |
|---|---|---|---|---|
| | CAR + CD30-CSR/CAR + 41BB-CSR | | | |
| Date | H1975 | MDA-MB-231 | H1703 | A549 |
| E1D7 | 0.99 | 0.83 | 0.30 | 1.10 |
| E2D7 | 0.97 | 0.73 | 0.78 | 0.91 |
| E3D7 | 0.55 | 0.76 | 0.78 | 0.88 |
| E4D7 | 0.44 | 0.85 | 0.93 | 0.93 |

[0461] As can be seen in Table 26 that, in the long-term killing assay, the anti-ROR1 CAR+CD30-CSR T cells surprisingly killed more target cells than CAR+41BB-CSR T cells did in each of the four target cell lines' challenges. FIGS. 10A-10D showed that, in the long-term killing assay, the anti-ROR1 CAR+CD30-CSR T cells mostly had higher cell survival than CAR+41BB-CSR T cells, which indicated that CAR+CD30-CSR T cells had better T cell persistence. Further, because the only difference between the two CAR+CSR constructs is the intracellular domain of CSR, the CAR+CD30-CSR T cells' higher long-term target cell killing and T cell survival capabilities are mainly due to the intracellular domain, or costimulatory domain, of CD30.

[0462] C. Expression of T Cell Exhaustion Markers in Anti-ROR1 CAR+CSR T Cells after Co-Culture with Target Cells

[0463] The expression levels of the T cell exhaustion marker PD1 of the two anti-ROR1 CAR+CSR T cell groups were measured according to the methods described in Examples 6 and 13, using some of the ROR1⁺ cancer cell lines disclosed above. 10⁵ CAR⁺ (receptor⁺) T cells of the two anti-ROR1 CAR+CSR cell groups as described in this example were first co-cultured/engaged with various target cells at an ET ratio of 1:1 in multiple duplicates on 96-well plates. The target cells used in this example (Example 19 C) are A549, H1975, MDA-MB-231, and a multiple myeloma cell line RPMI8226. PD1 expression levels of T cells of at least one sample per sample group were measured on selected days after target cell engagements. Every seven days after the first engagement, the unused duplicate cell mixture samples of each group were re-challenged with 10⁵ fresh target cells. Representative results of the PD1 expression level measurements (MFI values) and calculated ratios of MFI value of CAR+CD30-CSR vs. CAR+41BB-CSR T cells are shown below in Tables 26A to 29B.

TABLE 26A
Comparison of PD1 Expression Levels of Anti-ROR1 CAR + CSR
CD8⁺ T Cells after Engagements with A549 Target Cells.

| | | | Ratio of PD1 |
|---|---|---|---|
| | PD1 Expression Level on | | Expression |
| | CD8⁺ T Cells (MFI) | | Levels on |
| | αROR1-CD8T- | αROR1-CD8T- | CD8⁺ T Cells |
| | 41BBz-CAR + | 41BBz-CAR + | CAR + CD30- |
| | αROR1-CD28T- | αROR1-CD28T- | CSR/CAR + |
| Date | CD30-CSR | 41BB-CSR | 41BB-CSR |
| E1D5 | 130 | 138 | 0.94 |
| E2D5 | 123 | 177 | 0.69 |
| E3D5 | 180 | 219 | 0.82 |
| E4D5 | 197 | 306 | 0.64 |

TABLE 26B
Comparison of PD1 Expression Levels of Anti-ROR1 CAR + CSR
CD4⁺ T Cells after Engagements with A549 Target Cells.

| | | | Ratio of PD1 |
|---|---|---|---|
| | PD1 Expression Level on | | Expression |
| | CD4⁺ T Cells (MFI) | | Levels on |
| | αROR1-CD8T- | αROR1-CD8T- | CD4⁺ T Cells |
| | 41BBz-CAR + | 41BBz-CAR + | CAR + CD30- |
| | αROR1-CD28T- | αROR1-CD28T- | CSR/CAR + |
| Date | CD30-CSR | 41BB-CSR | 41BB-CSR |
| E1D5 | 462 | 702 | 0.66 |
| E2D5 | 922 | 2175 | 0.42 |
| E3D5 | 1184 | 2570 | 0.46 |
| E4D5 | 1080 | 2175 | 0.50 |

TABLE 27A
Comparison of PD1 Expression Levels of Anti-ROR1 CAR + CSR
CD8⁺ T Cells after Engagements with H1975 Target Cells.

| | | | Ratio of PD1 |
|---|---|---|---|
| | PD1 Expression Level on | | Expression |
| | CD8⁺ T Cells (MFI) | | Levels on |
| | αROR1-CD8T- | αROR1-CD8T- | CD8⁺ T Cells |
| | 41BBz-CAR + | 41BBz-CAR + | CAR + CD30- |
| | αROR1-CD28T- | αROR1-CD28T- | CSR/CAR + |
| Date | CD30-CSR | 41BB-CSR | 41BB-CSR |
| E1D5 | 171 | 166 | 1.03 |
| E2D5 | 184 | 211 | 0.87 |
| E3D5 | 179 | 262 | 0.68 |
| E4D5 | 163 | 214 | 0.76 |

TABLE 27B
Comparison of PD1 Expression Levels of Anti-ROR1 CAR + CSR
CD4⁺ T Cells after Engagements with H1975 Target Cells.

| | | | Ratio of PD1 |
|---|---|---|---|
| | PD1 Expression Level on | | Expression |
| | CD4⁺ T Cells (MFI) | | Levels on |
| | αROR1-CD8T- | αROR1-CD8T- | CD4⁺ T Cells |
| | 41BBz-CAR + | 41BBz-CAR + | CAR + CD30- |
| | αROR1-CD28T- | αROR1-CD28T- | CSR/CAR + |
| Date | CD30-CSR | 41BB-CSR | 41BB-CSR |
| E1D5 | 522 | 759 | 0.69 |
| E2D5 | 710 | 1316 | 0.54 |
| E3D5 | 772 | 1643 | 0.47 |
| E4D5 | 565 | 1305 | 0.43 |

TABLE 28A
Comparison of PD1 Expression Levels of Anti-ROR1 CAR + CSR
CD8⁺ T Cells after Engagements with MDA-MB-231 Target Cells.

| | | | Ratio of PD1 |
|---|---|---|---|
| | PD1 Expression Level on | | Expression |
| | CD8⁺ T Cells (MFI) | | Levels on |
| | αROR1-CD8T- | αROR1-CD8T- | CD8⁺ T Cells |
| | 41BBz-CAR + | 41BBz-CAR + | CAR + CD30- |
| | αROR1-CD28T- | αROR1-CD28T- | CSR/CAR + |
| Date | CD30-CSR | 41BB-CSR | 41BB-CSR |
| E1D5 | 114 | 124 | 0.92 |
| E2D5 | 163 | 203 | 0.80 |
| E3D5 | 194 | 232 | 0.84 |
| E4D5 | 269 | 292 | 0.92 |

TABLE 28B
Comparison of PD1 Expression Levels of Anti-ROR1 CAR + CSR
CD4⁺ T Cells after Engagements with MDA-MB-231 Target Cells.

| | | | Ratio of PD1 |
|---|---|---|---|
| | PD1 Expression Level on | | Expression |
| | CD4⁺ T Cells (MFI) | | Levels on |
| | αROR1-CD8T- | αROR1-CD8T- | CD4⁺ T Cells |
| | 41BBz-CAR + | 41BBz-CAR + | CAR + CD30- |
| | αROR1-CD28T- | αROR1-CD28T- | CSR/CAR + |
| Date | CD30-CSR | 41BB-CSR | 41BB-CSR |
| E1D5 | 360 | 630 | 0.57 |
| E2D5 | 666 | 1406 | 0.47 |
| E3D5 | 650 | 1241 | 0.52 |
| E4D5 | 687 | 904 | 0.76 |

TABLE 29A
Comparison of PD1 Expression Levels of Anti-ROR1 CAR + CSR
CD8⁺ T Cells after Engagements with RPMI8226 Target Cells.

| | | | Ratio of PD1 |
|---|---|---|---|
| | PD1 Expression Level on | | Expression |
| | CD8⁺ T Cells (MFI) | | Levels on |
| | αROR1-CD8T- | αROR1-CD8T- | CD8⁺ T Cells |
| | 41BBz-CAR + | 41BBz-CAR + | CAR + CD30- |
| | αROR1-CD28T- | αROR1-CD28T- | CSR/CAR + |
| Date | CD30-CSR | 41BB-CSR | 41BB-CSR |
| E1D5 | 121 | 138 | 0.88 |
| E2D5 | 119 | 201 | 0.59 |
| E3D5 | 167 | 180 | 0.93 |
| E4D5 | 222 | 266 | 0.83 |

TABLE 29B
Comparison of PD1 Expression Levels of Anti-ROR1 CAR + CSR
CD4⁺ T Cells after Engagements with RPMI8226 Target Cells.

| | | | Ratio of PD1 |
|---|---|---|---|
| | PD1 Expression Level on | | Expression |
| | CD4⁺ T Cells (MFI) | | Levels on |
| | αROR1-CD8T- | αROR1-CD8T- | CD4⁺ T Cells |
| | 41BBz-CAR + | 41BBz-CAR + | CAR + CD30- |
| | αROR1-CD28T- | αROR1-CD28T- | CSR/CAR + |
| Date | CD30-CSR | 41BB-CSR | 41BB-CSR |
| E1D5 | 258 | 320 | 0.81 |
| E2D5 | 265 | 438 | 0.61 |
| E3D5 | 334 | 476 | 0.70 |
| E4D5 | 428 | 547 | 0.78 |

[0464] The results show that, surprisingly, expressing CAR+CD30-CSR resulted in T cells with significantly less exhaustion marker PD1 accumulation than expressing CAR+41BB-CSR, indicative of significantly more functional and less exhausted T cells. Further, because the only difference between the two CAR+CSR constructs is the intracellular domain of CSR, the reduction of cell exhaustion capability is mainly due to the intracellular domain, or costimulatory domain, of CD30. Also significantly, the lower levels of T cell exhaustion markers resulted from CAR+CD30-CSR expression as compared to CAR+41BB-CSR were also seen in both CD8⁺ T cells (cytotoxic T cells) and CD4⁺ T cells (T helper cells). anti-ROR1-cd8TM-41BBz-CAR+anti-ROR1-cd28TM-CD30IC-CSR T cells also exhibited lower PD-1 expression, and displayed a higher percentage and total cell number of central memory T subset, indicating better persistence.

[0465] D. Development and Maintenance of Central Memory T Cells from Anti-ROR1 CAR+CSR T Cells after Co-Culture with Target Cells

[0466] This example shows that anti-ROR1-CAR+anti-ROR1-CD30-CSR T cells developed into and maintained a high central memory T cell population after target stimulation, including total CD3⁺ central memory T cells and CD8⁺ subset central memory T cells. The cell surface expression of memory T cell markers CCR7 and CD45RA according to the methods described in Examples 5A, 5B, and 14, using all six of the ROR1V cancer cell lines disclosed above. 10⁵ CAR⁺ (receptor⁺) T cells of the two anti-ROR1 CAR+CSR cell groups as described in this example were first co-cultured/engaged with various target cells at an ET ratio of 1:1 in multiple duplicates on 96-well plates. Numbers of central memory T cells (Tcm cell counts) of at least one sample per sample group were quantified on selected days after target cell engagements, which were also labeled for CD3 (for total T cells, including CD8⁺ T cells and CD4⁺ T cells) or CD8 (for CD8⁺ T cells). Every seven days after the first engagement, the unused duplicate cell mixture samples of each group were re-challenged with 10⁵ fresh target cells. Representative results of central memory T cell counts and Tcm percentages of CAR+CD30-CSR and CAR+41BB-CSR T cells are shown in Tables 30 to 44. Central memory T cell percentage among all T cells is % Tcm in the population of total T cells (CD3⁺ cells). Tcm percentage among CD8⁺ cells is % Tcm in the population of CD8⁺ T cells. Ratios of Tcm cell counts and Tcm percentages were calculated for CAR+CD30-CSR over CAR+41BB-CSR T cells.

TABLE 30
Total Central Memory T (Tcm) Cell Counts of Anti-ROR1 CAR + CSR T Cells
after Engagements with A549 Target Cells.

| | Total Central Memory T Cell Count | | Ratio of Total Tcm Cell |
|---|---|---|---|
| | αROR1-CD8T-41BBz- | αROR1-CD8T-41BBz- | Count |
| | CAR + αROR1-CD28T- | CAR + αROR1-CD28T- | CAR + CD30-CSR/ |
| Date | CD30-CSR | 41BB-CSR | CAR + 41BB-CSR |
| E1D3 | 6591 | 4569 | 1.44 |
| E1D5 | 4678 | 4185 | 1.12 |
| E1D7 | 3272 | 2216 | 1.48 |
| E2D3 | 5861 | 3285 | 1.78 |
| E2D5 | 3301 | 2197 | 1.50 |
| E2D7 | 2498 | 2311 | 1.08 |
| E3D3 | 3063 | 2099 | 1.46 |
| E3D7 | 1301 | 1063 | 1.22 |
| E4D3 | 1285 | 1180 | 1.09 |
| E4D7 | 1876 | 1318 | 1.42 |

TABLE 31
Total Central Memory T (Tcm) Cell Counts of Anti-ROR1 CAR + CSR T Cells
after Engagements with H1703 Target Cells.

| | Total Central Memory T Cell Count | | Ratio of Total Tcm Cell |
|---|---|---|---|
| | αROR1-CD8T-41BBz- | αROR1-CD8T-41BBz- | Count |
| | CAR + αROR1-CD28T- | CAR + αROR1-CD28T- | CAR + CD30-CSR/ |
| Date | CD30-CSR | 41BB-CSR | CAR + 41BB-CSR |
| E1D3 | 14114 | 9043 | 1.56 |
| E1D5 | 14710 | 8351 | 1.76 |
| E1D7 | 8367 | 5256 | 1.59 |
| E2D3 | 9152 | 4072 | 2.25 |
| E2D5 | 6078 | 2921 | 2.08 |
| E2D7 | 5166 | 2152 | 2.4 |
| E3D3 | 2894 | 1573 | 1.84 |
| E3D5 | 1552 | 870 | 1.78 |
| E3D7 | 1280 | 692 | 1.85 |
| E4D3 | 685 | 445 | 1.54 |
| E4D5 | 701 | 421 | 1.67 |
| E4D7 | 805 | 385 | 2.09 |

TABLE 32
Total Central Memory T (Tcm) Cell Counts of Anti-ROR1 CAR + CSR T Cells
after Engagements with H1975 Target Cells.

| | Total Central Memory T Cell Count | | Ratio of Total Tcm Cell |
|---|---|---|---|
| | αROR1-CD8T-41BBz- | αROR1-CD8T-41BBz- | Count |
| | CAR + αROR1-CD28T- | CAR + αROR1-CD28T- | CAR + CD30-CSR/ |
| Date | CD30-CSR | 41BB-CSR | CAR + 41BB-CSR |
| E1D3 | 8487 | 3919 | 2.17 |
| E1D5 | 8162 | 5441 | 1.50 |
| E1D7 | 4835 | 2743 | 1.76 |
| E2D3 | 4157 | 3597 | 1.16 |
| E2D5 | 6404 | 3973 | 1.61 |
| E2D7 | 3899 | 2246 | 1.74 |
| E3D3 | 4134 | 2059 | 2.01 |
| E3D5 | 4229 | 2037 | 2.08 |
| E3D7 | 2353 | 744 | 3.16 |
| E4D3 | 1143 | 366 | 3.12 |
| E4D5 | 1870 | 480 | 3.90 |
| E4D7 | 2307 | 588 | 3.92 |

TABLE 33
Total Central Memory T (Tcm) Cell Counts of Anti-ROR1 CAR + CSR T Cells
after Engagements with Jekol Target Cells.

| | Total Central Memory T Cell Count | | |
|---|---|---|---|
| | αROR1-CD8T-41BBz- | αROR1-CD8T-41BBz- | Ratio of Total Tcm Cell |
| | CAR + αROR1-CD28T- | CAR + αROR1-CD28T- | Count CAR + CD30- |
| Date | CD30-CSR | 41BB-CSR | CSR/CAR + 41BB-CSR |
| E1D3 | 11112 | 8020 | 1.39 |
| E1D5 | 15748 | 12297 | 1.28 |
| E1D7 | 7997 | 6201 | 1.29 |
| E2D3 | 18543 | 15587 | 1.19 |
| E2D5 | 21033 | 17589 | 1.20 |
| E2D7 | 15352 | 16600 | 0.92 |
| E3D3 | 26869 | 28181 | 0.95 |
| E3D5 | 21111 | 20372 | 1.04 |
| E3D7 | 15848 | 14179 | 1.12 |
| E4D3 | 16083 | 13652 | 1.18 |
| E4D5 | 12481 | 10937 | 1.14 |
| E4D7 | 12050 | 7060 | 1.71 |

TABLE 34
Total Central Memory T (Tcm) Cell Counts of Anti-ROR1 CAR + CSR T Cells
after Engagements with MDA-MB-231 Target Cells.

| | Total Central Memory T Cell Count | | Ratio of Total Tcm Cell |
|---|---|---|---|
| | αROR1-CD8T-41BBz- | αROR1-CD8T-41BBz- | Count |
| | CAR + αROR1-CD28T- | CAR + αROR1-CD28T- | CAR + CD30-CSR/ |
| Date | CD30-CSR | 41BB-CSR | CAR + 41BB-CSR |
| E1D3 | 13170 | 9671 | 1.36 |
| E1D5 | 22288 | 15219 | 1.46 |
| E1D7 | 16944 | 8804 | 1.92 |
| E2D3 | 21900 | 8974 | 2.44 |
| E2D5 | 9364 | 7484 | 1.25 |
| E2D7 | 11086 | 6450 | 1.72 |
| E3D3 | 9536 | 6533 | 1.46 |
| E3D5 | 7950 | 6506 | 1.22 |
| E3D7 | 5911 | 4035 | 1.46 |
| E4D3 | 6617 | 4580 | 1.44 |
| E4D5 | 4499 | 2859 | 1.57 |
| E4D7 | 3570 | 2550 | 1.40 |

TABLE 35
Total Central Memory T (Tcm) Cell Counts of Anti-ROR1 CAR + CSR T Cells
after Engagements with RPMI8226 Target Cells.

| | Total Central Memory T Cell Count | | Ratio of Total Tcm Cell |
|---|---|---|---|
| | αROR1-CD8T-41BBz- | αROR1-CD8T-41BBz- | Count |
| | CAR + αROR1-CD28T- | CAR + αROR1-CD28T- | CAR + CD30-CSR/ |
| Date | CD30-CSR | 41BB-CSR | CAR + 41BB-CSR |
| E1D3 | 12357 | 8688 | 1.42 |
| E1D5 | 18237 | 12118 | 1.50 |
| E1D7 | 10122 | 6213 | 1.63 |
| E2D3 | 21261 | 19582 | 1.09 |
| E2D5 | 21338 | 23301 | 0.92 |
| E2D7 | 21499 | 22798 | 0.94 |
| E3D3 | 36404 | 21430 | 1.70 |
| E3D5 | 27640 | 15685 | 1.76 |
| E3D7 | 29114 | 16323 | 1.78 |
| E4D3 | 18272 | 13113 | 1.39 |
| E4D5 | 14910 | 13129 | 1.14 |
| E4D7 | 17514 | 15699 | 1.12 |

TABLE 36
Central Memory T Cell (Tcm) Percentage among All T Cells from Anti-ROR1
CAR + CSR T Cells after Engagements with A549 Target Cells.

| | Central Memory T Cell Percentage among | | |
|---|---|---|---|
| | All T Cells (%) | | |
| | αROR1-CD8T-41BBz- | αROR1-CD8T-41BBz- | Ratio of Tcm Percentages |
| | CAR + αROR1-CD28T- | CAR + αROR1-CD28T- | CAR + CD30-CSR/ |
| Date | CD30-CSR | 41BB-CSR | CAR + 41BB-CSR |
| E1D3 | 14.9 | 10.9 | 1.37 |
| E1D5 | 15.5 | 12.3 | 1.26 |
| E1D7 | 17.0 | 13.6 | 1.25 |
| E2D3 | 19.0 | 14.8 | 1.28 |
| E2D5 | 16.0 | 11.0 | 1.45 |
| E2D7 | 14.3 | 13.1 | 1.09 |
| E3D3 | 18.1 | 13.5 | 1.34 |
| E3D7 | 14.1 | 11.1 | 1.27 |
| E4D3 | 13.5 | 10.9 | 1.24 |
| E4D7 | 14.5 | 12.1 | 1.20 |

TABLE 37
Central Memory T Cell (Tcm) Percentage among All T Cells from Anti-ROR1
CAR + CSR T Cells after Engagements with H1975 Target Cells.

| | Central Memory T Cell Percentage among | | |
|---|---|---|---|
| | All T Cells (%) | | |
| | αROR1-CD8T-41BBz- | αROR1-CD8T-41BBz- | Ratio of Tcm Percentages |
| | CAR + αROR1-CD28T- | CAR + αROR1-CD28T- | CAR + CD30-CSR/ |
| Date | CD30-CSR | 41BB-CSR | CAR + 41BB-CSR |
| E1D3 | 16.6 | 13.6 | 1.22 |
| E1D5 | 19.5 | 16.4 | 1.19 |
| E1D7 | 21.6 | 17.1 | 1.26 |
| E2D3 | 21.5 | 17.8 | 1.21 |
| E2D5 | 21.2 | 18.1 | 1.17 |
| E2D7 | 17.7 | 15.7 | 1.13 |
| E3D3 | 18.8 | 16.5 | 1.14 |
| E3D5 | 19.0 | 16.8 | 1.13 |
| E3D7 | 17.5 | 12.8 | 1.37 |
| E4D3 | 14.2 | 9.26 | 1.53 |
| E4D5 | 11.3 | 10.7 | 1.06 |
| E4D7 | 17.5 | 13.5 | 1.30 |

TABLE 38
Central Memory T Cell (Tcm) Percentage among All T Cells from Anti-ROR1
CAR + CSR T Cells after Engagements with Jekol Target Cells.

| | Central Memory T Cell Percentage among | | |
|---|---|---|---|
| | All T Cells (%) | | |
| | αROR1-CD8T-41BBz- | αROR1-CD8T-41BBz- | Ratio of Tcm Percentages |
| | CAR + αROR1-CD28T- | CAR + αROR1-CD28T- | CAR + CD30-CSR/ |
| Date | CD30-CSR | 41BB-CSR | CAR + 41BB-CSR |
| E1D3 | 13.9 | 8.96 | 1.55 |
| E1D5 | 18.1 | 13.4 | 1.35 |
| E1D7 | 20.0 | 15.6 | 1.28 |
| E2D3 | 21.1 | 16.8 | 1.26 |
| E2D5 | 21.6 | 17.7 | 1.22 |
| E2D7 | 24.1 | 21.9 | 1.10 |
| E3D3 | 32.8 | 26.8 | 1.22 |
| E3D5 | 28.9 | 22.9 | 1.26 |
| E3D7 | 30.5 | 27.0 | 1.13 |
| E4D3 | 31.1 | 21.6 | 1.44 |
| E4D5 | 21.7 | 17.8 | 1.22 |
| E4D7 | 25.5 | 23.7 | 1.08 |

TABLE 39
Central Memory T Cell (Tcm) Percentage among All T Cells from Anti-ROR1
CAR + CSR T Cells after Engagements with RPMI8226 Target Cells.

| | Central Memory T Cell Percentage among | | |
|---|---|---|---|
| | All T Cells (%) | | |
| | αROR1-CD8T-41BBz- | αROR1-CD8T-41BBz- | Ratio of Tcm Percentages |
| | CAR + αROR1-CD28T- | CAR + αROR1-CD28T- | CAR + CD30-CSR/ |
| Date | CD30-CSR | 41BB-CSR | CAR + 41BB-CSR |
| E1D3 | 13.2 | 10.0 | 1.32 |
| E1D5 | 18.6 | 16.2 | 1.15 |
| E1D7 | 22.8 | 20.0 | 1.14 |
| E2D3 | 22.7 | 19.5 | 1.16 |
| E2D5 | 19.8 | 19.2 | 1.03 |
| E2D7 | 25.0 | 22.9 | 1.09 |
| E3D3 | 32.9 | 18.7 | 1.76 |
| E3D5 | 26.5 | 18.0 | 1.47 |
| E3D7 | 35.6 | 24.4 | 1.46 |
| E4D3 | 22.5 | 15.5 | 1.45 |
| E4D5 | 19.9 | 14.9 | 1.34 |
| E4D7 | 30.2 | 22.9 | 1.32 |

TABLE 40
CD8⁺ Central Memory T (Tcm) Cell Counts of Anti-ROR1 CAR + CSR T Cells
after Engagements with H1975 Target Cells.

| | CD8⁺ Central Memory T Cell Count | | Ratio of CD8⁺ Tcm Cell |
|---|---|---|---|
| | αROR1-CD8T-41BBz- | αROR1-CD8T-41BBz- | Count |
| | CAR + αROR1-CD28T- | CAR + αROR1-CD28T- | CAR + CD30-CSR/ |
| Date | CD30-CSR | 41BB-CSR | CAR + 41BB-CSR |
| E1D3 | 2554 | 1308 | 1.95 |
| E1D5 | 3315 | 2173 | 1.53 |
| E1D7 | 2081 | 1264 | 1.65 |
| E2D3 | 2083 | 1864 | 1.12 |
| E2D5 | 2927 | 2042 | 1.43 |
| E2D7 | 1962 | 1264 | 1.55 |
| E3D3 | 2500 | 832 | 3.00 |
| E3D5 | 2146 | 1077 | 1.99 |
| E3D7 | 1264 | 391 | 3.23 |
| E4D3 | 588 | 168 | 3.50 |
| E4D5 | 893 | 224 | 3.99 |
| E4D7 | 1446 | 288 | 5.02 |

TABLE 41
CD8⁺ Central Memory T (Tcm) Cell Counts of Anti-ROR1 CAR + CSR T Cells
after Engagements with MDA-MB-231 Target Cells.

| | CD8⁺ Central Memory T Cell Count | | Ratio of CD8⁺ Tcm Cell |
|---|---|---|---|
| | αROR1-CD8T-41BBz- | αROR1-CD8T-41BBz- | Count |
| | CAR + αRORl-CD28T- | CAR + αRORl-CD28T- | CAR + CD30-CSR/ |
| Date | CD30-CSR | 41BB-CSR | CAR + 41BB-CSR |
| E1D3 | 4275 | 3077 | 1.39 |
| E1D5 | 8674 | 6812 | 1.27 |
| E1D7 | 7494 | 4388 | 1.71 |
| E2D3 | 12155 | 4945 | 2.46 |
| E2D5 | 4826 | 4037 | 1.20 |
| E2D7 | 5925 | 3650 | 1.62 |
| E3D3 | 7391 | 4589 | 1.62 |
| E3D5 | 4108 | 3337 | 1.23 |
| E3D7 | 3624 | 2323 | 1.56 |
| E4D3 | 4249 | 2892 | 1.47 |
| E4D5 | 1711 | 1261 | 1.36 |
| E4D7 | 1627 | 1490 | 1.09 |

TABLE 42
Central Memory T Cell (Tcm) Percentage among CD8⁺ Cells from Anti-ROR1
CAR + CSR T Cells after Engagements with H1975 Target Cells.

| | Central Memory T Cell Percentage among | | |
|---|---|---|---|
| | CD8⁺ T Cells (%) | | |
| | αROR1-CD8T-41BBz- | αROR1-CD8T-41BBz- | Ratio of Tcm Percentages |
| | CAR + αROR1-CD28T- | CAR + αROR1-CD28T- | CAR + CD30-CSR/ |
| Date | CD30-CSR | 41BB-CSR | CAR + 41BB-CSR |
| E1D3 | 8.9 | 7.7 | 1.15 |
| E1D5 | 13.4 | 10.9 | 1.23 |
| E1D7 | 16.2 | 13.1 | 1.24 |
| E2D3 | 17.9 | 14.5 | 1.23 |
| E2D5 | 16.1 | 14.5 | 1.11 |
| E2D7 | 13.7 | 13.0 | 1.05 |
| E3D3 | 17.0 | 13.5 | 1.26 |
| E3D5 | 15.5 | 14.1 | 1.10 |
| E3D7 | 14.0 | 9.8 | 1.44 |
| E4D3 | 11.3 | 6.5 | 1.73 |
| E4D5 | 8.0 | 7.5 | 1.07 |
| E4D7 | 15.4 | 9.7 | 1.59 |

TABLE 43
Central Memory T Cell (Tcm) Percentage among CD8⁺ Cells from Anti-ROR1
CAR + CSR T Cells after Engagements with Jekol Target Cells.

| | Central Memory T Cell Percentage among | | |
|---|---|---|---|
| | CD8⁺ T Cells (%) | | |
| | αROR1-CD8T-41BBz- | αROR1-CD8T-41BBz- | Ratio of Tcm Percentages |
| | CAR + αROR1-CD28T- | CAR + αROR1-CD28T- | CAR + CD30-CSR/ |
| Date | CD30-CSR | 41BB-CSR | CAR + 41BB-CSR |
| E1D3 | 6.0 | 3.5 | 1.71 |
| E1D5 | 9.5 | 7.4 | 1.27 |
| E1D7 | 12.7 | 10.3 | 1.23 |
| E2D3 | 12.4 | 10.0 | 1.24 |
| E2D5 | 14.5 | 12.3 | 1.18 |
| E2D7 | 18.0 | 16.6 | 1.08 |
| E3D3 | 26.6 | 22.2 | 1.20 |
| E3D5 | 22.1 | 17.9 | 1.23 |
| E3D7 | 24.8 | 21.8 | 1.14 |
| E4D3 | 23.7 | 16.2 | 1.46 |
| E4D5 | 17.8 | 14.2 | 1.25 |
| E4D7 | 20.4 | 18.0 | 1.13 |

TABLE 44
Central Memory T Cell (Tcm) Percentage among CD8⁺ Cells from Anti-ROR1
CAR + CSR T Cells after Engagements with RPMI8226 Target Cells.

| | Central Memory T Cell Percentage among | | |
|---|---|---|---|
| | CD8⁺ T Cells (%) | | |
| | αROR1-CD8T-41BBz- | αROR1-CD8T-41BBz- | Ratio of Tcm Percentages |
| | CAR + αROR1-CD28T- | CAR + αROR1-CD28T- | CAR + CD30-CSR/ |
| Date | CD30-CSR | 41BB-CSR | CAR + 41BB-CSR |
| E1D3 | 6.8 | 5.0 | 1.36 |
| E1D5 | 11.2 | 10.4 | 1.08 |
| E1D7 | 16.3 | 14.2 | 1.15 |
| E2D3 | 11.9 | 10.2 | 1.17 |
| E2D5 | 14.6 | 15.1 | 0.97 |
| E2D7 | 20.0 | 18.5 | 1.08 |
| E3D3 | 24.4 | 15.9 | 1.53 |
| E3D5 | 22.1 | 15.4 | 1.44 |
| E3D7 | 30.7 | 19.5 | 1.57 |
| E4D3 | 18.0 | 12.0 | 1.50 |
| E4D5 | 17.2 | 13.0 | 1.32 |
| E4D7 | 26.4 | 19.8 | 1.33 |

[0467] The results show that, surprisingly, expressing CAR+CD30-CSR resulted in T cells with significantly higher central memory T cells than expressing CAR+41BB-CSR, indicative of more capability to “store” long-term T cell immune function against the specific targets Further, because the only difference between the two CAR+CSR constructs is the intracellular domain of CSR, the capability of developing and maintaining high numbers of central memory T cells is mainly due to the intracellular domain, or costimulatory domain, of CD30.

### EXEMPLARY EMBODIMENTS

[0468] Exemplary embodiments provided in accordance with the presently disclosed subject matter include, but are not limited to, the claims and the following embodiments:

1. An immune cell comprising:
(a) a chimeric antigen receptor (CAR) comprising:
(i) an extracellular target-binding domain comprising an antibody moiety (a CAR antibody moiety);
(ii) a transmembrane domain (a CAR transmembrane domain); and
(iii) a primary signaling domain, and
(b) a chimeric stimulating receptor (CSR) comprising:
(i) a ligand-binding module that is capable of binding or interacting with a target ligand;
(ii) a transmembrane domain (a CSR transmembrane domain); and
(iii) a CD30 costimulatory domain, wherein the CSR lacks a functional primary signaling domain.
2. The immune cell of embodiment 1, wherein the CD30 costimulatory domain comprises a sequence that can bind to an intracellular TRAF signaling protein.
3. The immune cell of embodiment 2, wherein the sequence that can bind to an intracellular TRAF signaling protein corresponds to residues 561-573 or 578-586 of a full-length CD30 having the sequence of SEQ ID NO:65.
4. The immune cell of any one of embodiments 1 to 3, wherein the CD30 costimulatory domain comprises a sequence that is at least 80%, 85%, 90%, 95%, or 100% identical to residues 561-573 or 578-586 of SEQ ID NO:65.
5. The immune cell of any one of embodiments 1 to 4, wherein the CD30 costimulatory domain comprises a sequence that is at least 70%, 75%, 80%, 85%, 90%, 95%, or 100% identical to the sequence of SEQ ID NO:75.
6. The immune cell of any one of embodiments 1 to 5, wherein the CSR comprises more than one CD30 costimulatory domain.
7. The immune cell of any one of embodiments 1 to 6, wherein the CSR further comprises at least one costimulatory domain which comprises the intracellular sequence of a costimulatory molecule that is different from CD30.
8. The immune cell of embodiment 7, wherein the costimulatory molecule that is different from CD30 is selected from the group consisting of CD27, CD28, 4-1BB (CD137), OX40, CD40, PD-1, ICOS, lymphocyte function-associated antigen-1 (LFA-1), CD2, CD7, LIGHT, NKG2C, B7-H3, and a ligand that specifically binds with CD83.
9. The immune cell of any one of embodiments 1 to 8, wherein the CAR further comprises a costimulatory domain (a CAR costimulatory domain).
10. The immune cell of embodiment 9, wherein the CAR costimulatory domain is derived from the intracellular domain of a costimulatory receptor.
11. The immune cell of embodiment 10, wherein the costimulatory receptor is selected from the group consisting of CD30, CD27, CD28, 4-1BB (CD137), OX40, CD40, PD-1, ICOS, lymphocyte function-associated antigen-1 (LFA-1), CD2, CD7, LIGHT, NKG2C, B7-H3, and a ligand that specifically binds with CD83.
12. The immune cell of any one of embodiments 1 to 11, wherein the ligand-binding module of the CSR is derived from the extracellular domain of a receptor.
13. The immune cell of any one of embodiments 1 to 11, the ligand-binding module of the CSR comprises an antibody moiety (a CSR antibody moiety).
14. The immune cell of embodiment 13, wherein the CSR antibody moiety is a single chain antibody fragment.
15. The immune cell of any one of embodiments 1 to 14, wherein the CAR antibody moiety is a single chain antibody fragment.
16. The immune cell of any one of embodiments 1 to 15, wherein the CAR antibody moiety and/or the CSR antibody moiety is a single chain Fv (scFv), a single chain Fab, a single chain Fab′, a single domain antibody fragment, a single domain multispecific antibody, an intrabody, a nanobody, or a single chain immunokine.
17. The immune cell of embodiment 16, wherein the CAR antibody moiety and/or the CSR antibody moiety is a single domain multispecific antibody.
18. The immune cell of embodiment 17, wherein the single domain multispecific antibody is a single domain bispecific antibody.
19. The immune cell of any one of embodiments 1 to 18, wherein the CAR antibody moiety and/or the CSR antibody moiety is a single chain Fv (scFv).
20. The immune cell of embodiment 19, wherein the scFv is a tandem scFv.
21. The immune cell of any one of embodiments 1 to 20, wherein the CAR antibody moiety and/or the CSR antibody moiety specifically binds to a disease-related antigen.
22. The immune cell of embodiment 21, wherein the disease-related antigen is a cancer-related antigen.
23. The immune cell of embodiment 21, wherein the disease-related antigen is a virus-related antigen.
24. The immune cell of any one of embodiments 1 to 23, wherein the CAR antibody moiety and/or the CSR antibody moiety specifically binds to a cell surface antigen.
25. The immune cell of embodiment 24, wherein the cell surface antigen is selected from the group consisting of protein, carbohydrate, and lipid.
26. The immune cell of embodiment 24 or 25, wherein the cell surface antigen is CD19, CD20, CD22, CD47, CD158e, GPC3, ROR1, ROR2, BCMA, GPRC5D, FcRL5, MUC16, MCT4, PSMA, or a variant or mutant thereof.
27. The immune cell of any one of embodiments 1 to 26, wherein the CAR antibody moiety and the CSR antibody moiety specifically bind to the same antigen.
28. The immune cell of embodiment 27, wherein the CAR antibody moiety and the CSR antibody moiety specifically bind to different epitopes on the same antigen.
29. The immune cell of any one of embodiments 1 to 26, wherein the CAR antibody moiety and/or the CSR antibody moiety specifically binds to a MHC-restricted antigen.
30. The immune cell of embodiment 29, wherein the MHC-restricted antigen is a complex comprising a peptide and an MHC protein, and wherein the peptide is derived from a protein selected from the group consisting of WT-1, AFP, GPC3, HPV16-E7, NY-ESO-1, PRAME, EBV-LMP2A, HIV-1, KRAS, FoxP3, Histone H3.3, PSA, ROR1, and a variant or mutant thereof.
31. The immune cell of any one of embodiments 1 to 28, wherein the CAR antibody moiety binds to CD19, and wherein the ligand-binding module of the CSR binds to CD19.
32. The immune cell of any one of embodiments 1 to 28, wherein the CAR antibody moiety binds to CD22, and wherein the ligand-binding module of the CSR binds to CD22.
33. The immune cell of any one of embodiments 1 to 28, wherein the CAR antibody moiety binds to CD20, and wherein the ligand-binding module of the CSR binds to CD20.
34. The immune cell of any one of embodiments 1 to 26, wherein the CAR antibody moiety binds to CD19, and wherein the ligand-binding module of the CSR binds to CD22.
35. The immune cell of any one of embodiments 1 to 26, wherein the CAR antibody moiety binds to CD19, and wherein the ligand-binding module of the CSR binds to CD20.
36. The immune cell of any one of embodiments 1 to 26, wherein the CAR antibody moiety binds to CD22, and wherein the ligand-binding module of the CSR binds to CD20.
37. The immune cell of any one of embodiments 1 to 26, wherein the CAR antibody moiety binds to CD22, and wherein the ligand-binding module of the CSR binds to CD19.
38. The immune cell of any one of embodiments 1 to 26, wherein the CAR antibody moiety binds to CD20, and wherein the ligand-binding module of the CSR binds to CD19.
39. The immune cell of any one of embodiments 1 to 26, wherein the CAR antibody moiety binds to CD20, and wherein the ligand-binding module of the CSR binds to CD22.
40. The CAR of any one of embodiments 1 to 26, wherein the CAR antibody moiety and/or the ligand-binding module of the CSR binds to both CD19 and CD22.
41. The CAR of any one of embodiments 1 to 26, wherein the CAR antibody moiety and/or the ligand-binding module of the CSR binds to both CD19 and CD20.
42. The CAR of any one of embodiments 1 to 26, wherein the CAR antibody moiety and/or the ligand-binding module of the CSR binds to both CD20 and CD22.
43. The CAR of any one of embodiments 1 to 26, wherein the CAR antibody moiety and/or the ligand-binding module of the CSR binds to CD19, CD20, and CD22.
44. The immune cell of any one of embodiments 1 to 30, wherein the CAR antibody moiety specifically binds to a complex comprising an alpha-fetoprotein (AFP) peptide and an MHC class I protein.
45. The immune cell of embodiment 44, wherein the AFP peptide comprises a sequence of any one of SEQ ID NOS:157-167.
46. The immune cell of embodiment 44 or 45, wherein antibody moiety comprises:
(a) sequences of HCDR1, HCDR2, and HCDR3 of SEQ ID NOS:168-170, respectively, and optionally a heavy chain variable region having the sequence of SEQ ID NO:171, and sequences LCDR1, LCDR2, and LCDR3 of SEQ ID NOS:172-174, respectively, and optionally a light chain variable region having the sequence of SEQ ID NO:175; or
(b) sequences of HCDR1, HCDR2, and HCDR3 of SEQ ID NOS:176-178, respectively, and optionally a heavy chain variable region having the sequence of SEQ ID NO:179, and sequences LCDR1, LCDR2, and LCDR3 of SEQ ID NOS:180-182, respectively, and optionally a light chain variable region having the sequence of SEQ ID NO:183; or
(c) sequences of HCDR1, HCDR2, and HCDR3 of SEQ ID NOS:184-186, respectively, and optionally a heavy chain variable region having the sequence of SEQ ID NO:187, and sequences LCDR1, LCDR2, and LCDR3 of SEQ ID NOS:188-190, respectively, and optionally a light chain variable region having the sequence of SEQ ID NO:191; or
(d) sequences of HCDR1, HCDR2, and HCDR3 of SEQ ID NOS:192-194, respectively, and optionally a heavy chain variable region having the sequence of SEQ ID NO:195, and sequences LCDR1, LCDR2, and LCDR3 of SEQ ID NOS:196-198, respectively, and optionally a light chain variable region having the sequence of SEQ ID NO:199; or
(e) sequences of HCDR1, HCDR2, and HCDR3 of SEQ ID NOS:200-202, respectively, and optionally a heavy chain variable region having the sequence of SEQ ID NO:203, and sequences LCDR1, LCDR2, and LCDR3 of SEQ ID NOS:204-206, respectively, and optionally a light chain variable region having the sequence of SEQ ID NO:207.
47. The immune cell of any one of embodiments 1 to 30, wherein the CAR antibody moiety specifically binds to glypican 3 (GPC3).
48. The immune cell of any one of embodiments 1 to 30 and 47, wherein the ligand-binding module of the CSR specifically binds to GPC3.
49. The immune cell of any one of embodiments 1 to 30, wherein the CAR antibody moiety binds to a complex comprising an AFP peptide and an MHC class I protein, and wherein the ligand-binding module of the CSR binds to GPC3.
50. The immune cell of any one of embodiments 1 to 30, wherein both the CAR antibody moiety and the ligand-binding module of the CSR bind to GPC3.
51. The immune cell of any one of embodiments 47, 48, and 50, wherein the CAR antibody moiety and the ligand-binding module of the CSR specifically bind to different epitopes on GPC3.
52. The immune cell of any one of embodiments 47, 48, 50, and 51, wherein the CAR antibody moiety and/or the ligand-binding module of the CSR comprises:
(a) sequences of HCDR1, HCDR2, and HCDR3 of SEQ ID NOS:208-210, respectively, and optionally a heavy chain variable region having the sequence of SEQ ID NO:211, and sequences LCDR1, LCDR2, and LCDR3 of SEQ ID NOS:212-214, respectively, and optionally a light chain variable region having the sequence of SEQ ID NO:215; or
(b) sequences of HCDR1, HCDR2, and HCDR3 of SEQ ID NOS:216-218, respectively, and optionally a heavy chain variable region having the sequence of SEQ ID NO:219, and sequences LCDR1, LCDR2, and LCDR3 of SEQ ID NOS:220-222, respectively, and optionally a light chain variable region having the sequence of SEQ ID NO:223; or
(c) sequences of HCDR1, HCDR2, and HCDR3 of SEQ ID NOS:224-226, respectively, and optionally a heavy chain variable region having the sequence of SEQ ID NO:227, and sequences LCDR1, LCDR2, and LCDR3 of SEQ ID NOS:228-230, respectively, and optionally a light chain variable region having the sequence of SEQ ID NO:231; or
(d) sequences of HCDR1, HCDR2, and HCDR3 of SEQ ID NOS:232-234, respectively, and optionally a heavy chain variable region having the sequence of SEQ ID NO:235, and sequences LCDR1, LCDR2, and LCDR3 of SEQ ID NOS:236-238, respectively, and optionally a light chain variable region having the sequence of SEQ ID NO:239; or
(e) sequences of HCDR1, HCDR2, and HCDR3 of SEQ ID NOS:240-242, respectively, and optionally a heavy chain variable region having the sequence of SEQ ID NO:243, and sequences LCDR1, LCDR2, and LCDR3 of SEQ ID NOS:244-246, respectively, and optionally a light chain variable region having the sequence of SEQ ID NO:247; or
(f) sequences of HCDR1, HCDR2, and HCDR3 of SEQ ID NOS:248-250, respectively, and optionally a heavy chain variable region having the sequence of SEQ ID NO:251, and sequences LCDR1, LCDR2, and LCDR3 of SEQ ID NOS:252-254, respectively, and optionally a light chain variable region having the sequence of SEQ ID NO:255; or
(g) sequences of HCDR1, HCDR2, and HCDR3 of SEQ ID NOS:256-258, respectively, and optionally a heavy chain variable region having the sequence of SEQ ID NO:259, and sequences LCDR1, LCDR2, and LCDR3 of SEQ ID NOS:260-262, respectively, and optionally a light chain variable region having the sequence of SEQ ID NO:263.
53. The immune cell of any one of embodiments 1 to 30, wherein the CAR antibody moiety specifically binds to a complex comprising a KRAS peptide and an MHC class I protein.
54. The immune cell of embodiment 53, wherein the KRAS peptide comprises a sequence of any one of SEQ ID NOS:264-272.
55. The immune cell of embodiment 53 or 54, wherein antibody moiety comprises:
(a) sequences of HCDR1, HCDR2, and HCDR3 of SEQ ID NOS:273-275, respectively, and optionally a heavy chain variable region having the sequence of SEQ ID NO:276, and sequences LCDR1, LCDR2, and LCDR3 of SEQ ID NOS:277-279, respectively, and optionally a light chain variable region having the sequence of SEQ ID NO:280, and optionally an scFv having the sequence of SEQ ID NO:281; or
(b) sequences of HCDR1, HCDR2, and HCDR3 of SEQ ID NOS:282-284, respectively, and optionally a heavy chain variable region having the sequence of SEQ ID NO:285, and sequences LCDR1, LCDR2, and LCDR3 of SEQ ID NOS:286-288, respectively, and optionally a light chain variable region having the sequence of SEQ ID NO:289, and optionally an scFv having the sequence of SEQ ID NO:290; or
(c) sequences of HCDR1, HCDR2, and HCDR3 of SEQ ID NOS:291-293, respectively, and optionally a heavy chain variable region having the sequence of SEQ ID NO:294, and sequences LCDR1, LCDR2, and LCDR3 of SEQ ID NOS:295-297, respectively, and optionally a light chain variable region having the sequence of SEQ ID NO:298, and optionally an scFv having the sequence of SEQ ID NO:299; or
(d) sequences of HCDR1, HCDR2, and HCDR3 of SEQ ID NOS:300-302, respectively, and optionally a heavy chain variable region having the sequence of SEQ ID NO:303, and sequences LCDR1, LCDR2, and LCDR3 of SEQ ID NOS:304-306, respectively, and optionally a light chain variable region having the sequence of SEQ ID NO:307, and optionally an scFv having the sequence of SEQ ID NO:308; or
(e) sequences of HCDR1, HCDR2, and HCDR3 of SEQ ID NOS:309-311, respectively, and optionally a heavy chain variable region having the sequence of SEQ ID NO:312, and sequences LCDR1, LCDR2, and LCDR3 of SEQ ID NOS:313-315, respectively, and optionally a light chain variable region having the sequence of SEQ ID NO:316, and optionally an scFv having the sequence of SEQ ID NO:317; or
(f) sequences of HCDR1, HCDR2, and HCDR3 of SEQ ID NOS:318-320, respectively, and optionally a heavy chain variable region having the sequence of SEQ ID NO:321, and sequences LCDR1, LCDR2, and LCDR3 of SEQ ID NOS:322-324, respectively, and optionally a light chain variable region having the sequence of SEQ ID NO:325, and optionally an scFv having the sequence of SEQ ID NO:326; or
(g) sequences of HCDR1, HCDR2, and HCDR3 of SEQ ID NOS:327-329, respectively, and optionally a heavy chain variable region having the sequence of SEQ ID NO:330, and sequences LCDR1, LCDR2, and LCDR3 of SEQ ID NOS:331-333, respectively, and optionally a light chain variable region having the sequence of SEQ ID NO:334, and optionally an scFv having the sequence of SEQ ID NO:335; or
(h) sequences of HCDR1, HCDR2, and HCDR3 of SEQ ID NOS:336-338, respectively, and optionally a heavy chain variable region having the sequence of SEQ ID NO:339, and sequences LCDR1, LCDR2, and LCDR3 of SEQ ID NOS:340-342, respectively, and optionally a light chain variable region having the sequence of SEQ ID NO:343, and optionally an scFv having the sequence of SEQ ID NO:344.
56. The immune cell of any one of embodiments 1 to 30, wherein the CAR antibody moiety specifically binds to a complex comprising a PSA peptide and an MHC class I protein.
57. The immune cell of embodiment 56, wherein the PSA peptide comprises a sequence of any one of SEQ ID NOS:345-355.
58. The immune cell of embodiment 56 or 57, wherein antibody moiety comprises:
(a) an HCDR1 having a sequence of any one of SEQ ID NOS:356-370, an HCDR2 having a sequence of any one of SEQ ID NOS:371-384, an HCDR3 having a sequence of any one of SEQ ID NOS:385-402, and optionally a heavy chain variable region having a sequence of any one of SEQ ID NOS:403-420; and/or
(b) an LCDR1 having a sequence of any one of SEQ ID NOS:421-437, an LCDR2 having a sequence of any one of SEQ ID NOS:438-450, an LCDR3 having a sequence of any one of SEQ ID NOS:451-468, and optionally a light chain variable region having a sequence of any one of SEQ ID NOS:469-486.
59. The immune cell of any one of embodiments 1 to 30, wherein the CAR antibody moiety specifically binds to a complex comprising a PSMA peptide and an MHC class I protein.
60. The immune cell of embodiment 59, wherein antibody moiety comprises an scFv having a sequence of SEQ ID NO:487-488.
61. The immune cell of any one of embodiments 1 to 30, wherein the CAR antibody moiety and/or the ligand-binding module of the CSR bind to ROR1.
62. The immune cell of embodiment 61, wherein the CAR antibody moiety and/or the ligand-binding module of the CSR binds to a ROR1 peptide having a sequence of any one of SEQ ID NOS:489-492.
63. The immune cell of embodiment 61 or 62, wherein the CAR antibody moiety and/or the ligand-binding module of the CSR comprises:
(a) sequences of HCDR1, HCDR2, and HCDR3 of SEQ ID NOS:493-495, respectively, and optionally a heavy chain variable region having the sequence of SEQ ID NO:496, and sequences LCDR1, LCDR2, and LCDR3 of SEQ ID NOS:497-499, respectively, and optionally a light chain variable region having the sequence of SEQ ID NO:500; or
(b) sequences of HCDR1, HCDR2, and HCDR3 of SEQ ID NOS:501-503, respectively, and optionally a heavy chain variable region having the sequence of SEQ ID NO:504, and sequences LCDR1, LCDR2, and LCDR3 of SEQ ID NOS:505-507, respectively, and optionally a light chain variable region having the sequence of SEQ ID NO:508.
64. The immune cell of any one of embodiments 1 to 30, wherein the CAR antibody moiety specifically binds to a complex comprising a NY-ESO-1 peptide and an MHC class I protein.
65. The immune cell of embodiment 64, wherein the NY-ESO-1 peptide comprises a sequence of any one of SEQ ID NOS:509-519.
66. The immune cell of embodiment 64 or 65, wherein the antibody moiety comprises:
(a) sequences of HCDR1, HCDR2, and HCDR3 of SEQ ID NOS:520-522, respectively, and optionally a heavy chain variable region having the sequence of SEQ ID NO:523, and sequences LCDR1, LCDR2, and LCDR3 of SEQ ID NOS:524-526, respectively, and optionally a light chain variable region having the sequence of SEQ ID NO:527; or
(b) sequences of HCDR1, HCDR2, and HCDR3 of SEQ ID NOS:528-530, respectively, and optionally a heavy chain variable region having the sequence of SEQ ID NO:531, and sequences LCDR1, LCDR2, and LCDR3 of SEQ ID NOS:532-534, respectively, and optionally a light chain variable region having the sequence of SEQ ID NO:535; or
(c) sequences of HCDR1, HCDR2, and HCDR3 of SEQ ID NOS:536-538, respectively, and optionally a heavy chain variable region having the sequence of SEQ ID NO:539, and sequences LCDR1, LCDR2, and LCDR3 of SEQ ID NOS:540-542, respectively, and optionally a light chain variable region having the sequence of SEQ ID NO:543; or
(d) sequences of HCDR1, HCDR2, and HCDR3 of SEQ ID NOS:544-546, respectively, and optionally a heavy chain variable region having the sequence of SEQ ID NO:547, and sequences LCDR1, LCDR2, and LCDR3 of SEQ ID NOS:548-550, respectively, and optionally a light chain variable region having the sequence of SEQ ID NO:551; or
(e) sequences of HCDR1, HCDR2, and HCDR3 of SEQ ID NOS:552-554, respectively, and optionally a heavy chain variable region having the sequence of SEQ ID NO:555, and sequences LCDR1, LCDR2, and LCDR3 of SEQ ID NOS:556-558, respectively, and optionally a light chain variable region having the sequence of SEQ ID NO:559; or
(f) sequences of HCDR1, HCDR2, and HCDR3 of SEQ ID NOS:560-562, respectively, and optionally a heavy chain variable region having the sequence of SEQ ID NO:563, and sequences LCDR1, LCDR2, and LCDR3 of SEQ ID NOS:564-566, respectively, and optionally a light chain variable region having the sequence of SEQ ID NO:567; or
(g) sequences of HCDR1, HCDR2, and HCDR3 of SEQ ID NOS:568-570, respectively, and optionally a heavy chain variable region having the sequence of SEQ ID NO:571, and sequences LCDR1, LCDR2, and LCDR3 of SEQ ID NOS:572-574, respectively, and optionally a light chain variable region having the sequence of SEQ ID NO:575.
67. The immune cell of any one of embodiments 1 to 30, wherein the CAR antibody moiety specifically binds to a complex comprising a PRAME peptide and an MHC class I protein.
68. The immune cell of embodiment 67, wherein the PRAME peptide comprises a sequence of any one of SEQ ID NOS:576-580.
69. The immune cell of embodiment 67 or 68, wherein the antibody moiety comprises:
(a) sequences of HCDR1, HCDR2, and HCDR3 of SEQ ID NOS:581-583, respectively, and optionally a heavy chain variable region having the sequence of SEQ ID NO:584, and sequences LCDR1, LCDR2, and LCDR3 of SEQ ID NOS:585-587, respectively, and optionally a light chain variable region having the sequence of SEQ ID NO:588; or
(b) sequences of HCDR1, HCDR2, and HCDR3 of SEQ ID NOS:589-591, respectively, and optionally a heavy chain variable region having the sequence of SEQ ID NO:592, and sequences LCDR1, LCDR2, and LCDR3 of SEQ ID NOS:593-595, respectively, and optionally a light chain variable region having the sequence of SEQ ID NO:596; or
(c) sequences of HCDR1, HCDR2, and HCDR3 of SEQ ID NOS:597-599, respectively, and optionally a heavy chain variable region having the sequence of SEQ ID NO:600, and sequences LCDR1, LCDR2, and LCDR3 of SEQ ID NOS:601-603, respectively, and optionally a light chain variable region having the sequence of SEQ ID NO:604; or
(d) sequences of HCDR1, HCDR2, and HCDR3 of SEQ ID NOS:605-607, respectively, and optionally a heavy chain variable region having the sequence of SEQ ID NO:608, and sequences LCDR1, LCDR2, and LCDR3 of SEQ ID NOS:609-611, respectively, and optionally a light chain variable region having the sequence of SEQ ID NO:612; or
(e) sequences of HCDR1, HCDR2, and HCDR3 of SEQ ID NOS:613-615, respectively, and optionally a heavy chain variable region having the sequence of SEQ ID NO:616, and sequences LCDR1, LCDR2, and LCDR3 of SEQ ID NOS:617-619, respectively, and optionally a light chain variable region having the sequence of SEQ ID NO:620; or
(a) sequences of HCDR1, HCDR2, and HCDR3 of SEQ ID NOS:621-623, respectively, and optionally a heavy chain variable region having the sequence of SEQ ID NO:624, and sequences LCDR1, LCDR2, and LCDR3 of SEQ ID NOS:625-627, respectively, and optionally a light chain variable region having the sequence of SEQ ID NO:628; or
(a) sequences of HCDR1, HCDR2, and HCDR3 of SEQ ID NOS:629-631, respectively, and optionally a heavy chain variable region having the sequence of SEQ ID NO:632, and sequences LCDR1, LCDR2, and LCDR3 of SEQ ID NOS:633-635, respectively, and optionally a light chain variable region having the sequence of SEQ ID NO:636.
70. The immune cell of any one of embodiments 1 to 30, wherein the CAR antibody moiety specifically binds to a complex comprising a WT1 peptide and an MHC class I protein.
71. The immune cell of embodiment 70, wherein the WT1 peptide comprises a sequence of SEQ ID NO:637.
72. The immune cell of embodiment 70 or 71, wherein antibody moiety comprises:
(a) sequences of HCDR1, HCDR2, and HCDR3 of SEQ ID NOS:638-640, respectively, and optionally a heavy chain variable region having the sequence of SEQ ID NO:641, and sequences LCDR1, LCDR2, and LCDR3 of SEQ ID NOS:642-644, respectively, and optionally a light chain variable region having the sequence of SEQ ID NO:645, and optionally an scFv having the sequence of SEQ ID NO:646; or
(b) sequences of HCDR1, HCDR2, and HCDR3 of SEQ ID NOS:647-649, respectively, and optionally a heavy chain variable region having the sequence of SEQ ID NO:650, and sequences LCDR1, LCDR2, and LCDR3 of SEQ ID NOS:651-653, respectively, and optionally a light chain variable region having the sequence of SEQ ID NO:654, and optionally an scFv having the sequence of SEQ ID NO:655; or
(c) sequences of HCDR1, HCDR2, and HCDR3 of SEQ ID NOS:656-658, respectively, and optionally a heavy chain variable region having the sequence of SEQ ID NO:659, and sequences LCDR1, LCDR2, and LCDR3 of SEQ ID NOS:660-662, respectively, and optionally a light chain variable region having the sequence of SEQ ID NO:663, and optionally an scFv having the sequence of SEQ ID NO:664; or
(d) sequences of HCDR1, HCDR2, and HCDR3 of SEQ ID NOS:665-667, respectively, and optionally a heavy chain variable region having the sequence of SEQ ID NO:668, and sequences LCDR1, LCDR2, and LCDR3 of SEQ ID NOS:669-671, respectively, and optionally a light chain variable region having the sequence of SEQ ID NO:672, and optionally an scFv having the sequence of SEQ ID NO:673; or
(e) sequences of HCDR1, HCDR2, and HCDR3 of SEQ ID NOS:674-676, respectively, and optionally a heavy chain variable region having the sequence of SEQ ID NO:677, and sequences LCDR1, LCDR2, and LCDR3 of SEQ ID NOS:678-680, respectively, and optionally a light chain variable region having the sequence of SEQ ID NO:681, and optionally an scFv having the sequence of SEQ ID NO:682; or
(f) sequences of HCDR1, HCDR2, and HCDR3 of SEQ ID NOS:683-685, respectively, and optionally a heavy chain variable region having the sequence of SEQ ID NO:686, and sequences LCDR1, LCDR2, and LCDR3 of SEQ ID NOS:687-689, respectively, and optionally a light chain variable region having the sequence of SEQ ID NO:690, and optionally an scFv having the sequence of SEQ ID NO:691.
73. The immune cell of any one of embodiments 1 to 30, wherein the CAR antibody moiety specifically binds to a complex comprising a histone H3.3 peptide and an MHC class I protein.
74. The immune cell of embodiment 73, wherein the histone H3.3 peptide comprises a sequence of any one of SEQ ID NOS:692-711.
75. The immune cell of embodiment 73 or 74, wherein antibody moiety comprises:
(a) sequences of HCDR1, HCDR2, and HCDR3 of SEQ ID NOS:712-714, respectively, and optionally a heavy chain variable region having the sequence of SEQ ID NO:715, and sequences LCDR1, LCDR2, and LCDR3 of SEQ ID NOS:716-718, respectively, and optionally a light chain variable region having the sequence of SEQ ID NO:719; or
(b) sequences of HCDR1, HCDR2, and HCDR3 of SEQ ID NOS:720-722, respectively, and optionally a heavy chain variable region having the sequence of SEQ ID NO:723, and sequences LCDR1, LCDR2, and LCDR3 of SEQ ID NOS:724-726, respectively, and optionally a light chain variable region having the sequence of SEQ ID NO:727; or
(c) sequences of HCDR1, HCDR2, and HCDR3 of SEQ ID NOS:728-730, respectively, and optionally a heavy chain variable region having the sequence of SEQ ID NO:731, and sequences LCDR1, LCDR2, and LCDR3 of SEQ ID NOS:732-734, respectively, and optionally a light chain variable region having the sequence of SEQ ID NO:735; or
(d) sequences of HCDR1, HCDR2, and HCDR3 of SEQ ID NOS:736-738, respectively, and optionally a heavy chain variable region having the sequence of SEQ ID NO:739, and sequences LCDR1, LCDR2, and LCDR3 of SEQ ID NOS:740-742, respectively, and optionally a light chain variable region having the sequence of SEQ ID NO:743; or
(e) sequences of HCDR1, HCDR2, and HCDR3 of SEQ ID NOS:744-746, respectively, and optionally a heavy chain variable region having the sequence of SEQ ID NO:747, and sequences LCDR1, LCDR2, and LCDR3 of SEQ ID NOS:748-750, respectively, and optionally a light chain variable region having the sequence of SEQ ID NO:751; or
(f) sequences of HCDR1, HCDR2, and HCDR3 of SEQ ID NOS:752-754, respectively, and optionally a heavy chain variable region having the sequence of SEQ ID NO:755, and sequences LCDR1, LCDR2, and LCDR3 of SEQ ID NOS:756-758, respectively, and optionally a light chain variable region having the sequence of SEQ ID NO:759; or
(g) sequences of HCDR1, HCDR2, and HCDR3 of SEQ ID NOS:760-762, respectively, and optionally a heavy chain variable region having the sequence of SEQ ID NO:763, and sequences LCDR1, LCDR2, and LCDR3 of SEQ ID NOS:764-766, respectively, and optionally a light chain variable region having the sequence of SEQ ID NO:767; or
(h) sequences of HCDR1, HCDR2, and HCDR3 of SEQ ID NOS:768-770, respectively, and optionally a heavy chain variable region having the sequence of SEQ ID NO:771, and sequences LCDR1, LCDR2, and LCDR3 of SEQ ID NOS:772-774, respectively, and optionally a light chain variable region having the sequence of SEQ ID NO:775; or
(i) sequences of HCDR1, HCDR2, and HCDR3 of SEQ ID NOS:776-778, respectively, and optionally a heavy chain variable region having the sequence of SEQ ID NO:779, and sequences LCDR1, LCDR2, and LCDR3 of SEQ ID NOS:780-782, respectively, and optionally a light chain variable region having the sequence of SEQ ID NO:783; or
(j) sequences of HCDR1, HCDR2, and HCDR3 of SEQ ID NOS:784-786, respectively, and optionally a heavy chain variable region having the sequence of SEQ ID NO:787, and sequences LCDR1, LCDR2, and LCDR3 of SEQ ID NOS:788-790, respectively, and optionally a light chain variable region having the sequence of SEQ ID NO:791; or
(k) sequences of HCDR1, HCDR2, and HCDR3 of SEQ ID NOS:792-794, respectively, and optionally a heavy chain variable region having the sequence of SEQ ID NO:795, and sequences LCDR1, LCDR2, and LCDR3 of SEQ ID NOS:796-798, respectively, and optionally a light chain variable region having the sequence of SEQ ID NO:799; or
(l) sequences of HCDR1, HCDR2, and HCDR3 of SEQ ID NOS:800-802, respectively, and optionally a heavy chain variable region having the sequence of SEQ ID NO:803, and sequences LCDR1, LCDR2, and LCDR3 of SEQ ID NOS:804-806, respectively, and optionally a light chain variable region having the sequence of SEQ ID NO:807.
76. The immune cell of any one of embodiments 1 to 30, wherein the ligand-binding module of the CSR binds to an MSLN peptide.
77. The immune cell of embodiment 76, wherein the ligand-binding module of the CSR comprises sequences of HCDR1, HCDR2, and HCDR3 of SEQ ID NOS:808-810, respectively, and optionally a heavy chain variable region having the sequence of SEQ ID NO:811, and sequences LCDR1, LCDR2, and LCDR3 of SEQ ID NOS:812-814, respectively, and optionally a light chain variable region having the sequence of SEQ ID NO:815.
78. The immune cell of any one of embodiments 1 to 30, wherein the ligand-binding module of the CSR binds to a ROR2 peptide.
79. The immune cell of embodiment 78, wherein the ROR2 peptide comprises the sequence of SEQ ID NO:816.
80. The immune cell of embodiment 78 or 79, wherein the ligand-binding module of the CSR comprises:
(a) sequences of HCDR1, HCDR2, and HCDR3 of SEQ ID NOS:817-819, respectively, and optionally a heavy chain variable region having the sequence of SEQ ID NO:820, and sequences LCDR1, LCDR2, and LCDR3 of SEQ ID NOS:821-823, respectively, and optionally a light chain variable region having the sequence of SEQ ID NO:824; or
(b) sequences of HCDR1, HCDR2, and HCDR3 of SEQ ID NOS:825-827, respectively, and optionally a heavy chain variable region having the sequence of SEQ ID NO:828, and sequences LCDR1, LCDR2, and LCDR3 of SEQ ID NOS:829-831, respectively, and optionally a light chain variable region having the sequence of SEQ ID NO:832; or
(c) sequences of HCDR1, HCDR2, and HCDR3 of SEQ ID NOS:833-835, respectively, and optionally a heavy chain variable region having the sequence of SEQ ID NO:836, and sequences LCDR1, LCDR2, and LCDR3 of SEQ ID NOS:837-839, respectively, and optionally a light chain variable region having the sequence of SEQ ID NO:840; or
(d) sequences of HCDR1, HCDR2, and HCDR3 of SEQ ID NOS:841-843, respectively, and optionally a heavy chain variable region having the sequence of SEQ ID NO:844, and sequences LCDR1, LCDR2, and LCDR3 of SEQ ID NOS:845-847, respectively, and optionally a light chain variable region having the sequence of SEQ ID NO:848; or
(e) sequences of HCDR1, HCDR2, and HCDR3 of SEQ ID NOS:849-851, respectively, and optionally a heavy chain variable region having the sequence of SEQ ID NO:852, and sequences LCDR1, LCDR2, and LCDR3 of SEQ ID NOS:853-855, respectively, and optionally a light chain variable region having the sequence of SEQ ID NO:856.
81. The immune cell of any one of embodiments 1 to 30, wherein the ligand-binding module of the CSR binds to a HER2 peptide.
82. The immune cell of embodiment 81, wherein the ligand-binding module of the CSR comprises sequences of HCDR1, HCDR2, and HCDR3 of SEQ ID NOS:857-859, respectively, and optionally a heavy chain variable region having the sequence of SEQ ID NO:860, and sequences LCDR1, LCDR2, and LCDR3 of SEQ ID NOS:861-863, respectively, and optionally a light chain variable region having the sequence of SEQ ID NO:864, and optionally an scFv having the sequence of SEQ ID NO:865.
83. The immune cell of any one of embodiments 1 to 30, wherein the ligand-binding module of the CSR binds to an EpCAM peptide.
84. The immune cell of embodiment 83, wherein the ligand-binding module of the CSR comprises sequences of HCDR1, HCDR2, and HCDR3 of SEQ ID NOS:866-868, respectively, and optionally a heavy chain variable region having the sequence of SEQ ID NO:869, and sequences LCDR1, LCDR2, and LCDR3 of SEQ ID NOS:870-872, respectively, and optionally a light chain variable region having the sequence of SEQ ID NO:873.
85. The immune cell of any one of embodiments 1 to 30, wherein the ligand-binding module of the CSR binds to a MUC1 peptide.
86. The immune cell of embodiment 85, wherein the ligand-binding module of the CSR comprises sequences of HCDR1, HCDR2, and HCDR3 of SEQ ID NOS:874-876, respectively, and optionally a heavy chain variable region having the sequence of SEQ ID NO:877, and sequences LCDR1, LCDR2, and LCDR3 of SEQ ID NOS:878-880, respectively, and optionally a light chain variable region having the sequence of SEQ ID NO:881.
87. The immune cell of any one of embodiments 1 to 30, wherein the ligand-binding module of the CSR binds to a MUC16 peptide.
88. The immune cell of embodiment 87, wherein the ligand-binding module of the CSR comprises:
(a) sequences of HCDR1, HCDR2, and HCDR3 of SEQ ID NOS:882-884, respectively, and optionally a heavy chain variable region having the sequence of SEQ ID NO:885, and sequences LCDR1, LCDR2, and LCDR3 of SEQ ID NOS:886-888, respectively, and optionally a light chain variable region having the sequence of SEQ ID NO:889; or
(b) sequences of HCDR1, HCDR2, and HCDR3 of SEQ ID NOS:890-892, respectively, and optionally a heavy chain variable region having the sequence of SEQ ID NO:893, and sequences LCDR1, LCDR2, and LCDR3 of SEQ ID NOS:894-896, respectively, and optionally a light chain variable region having the sequence of SEQ ID NO:897; or
(c) sequences of HCDR1, HCDR2, and HCDR3 of SEQ ID NOS:898-900, respectively, and optionally a heavy chain variable region having the sequence of SEQ ID NO:901 or 902, and sequences LCDR1, LCDR2, and LCDR3 of SEQ ID NOS:903-905, respectively, and optionally a light chain variable region having the sequence of SEQ ID NO:906 or 907; or
(d) sequences of HCDR1, HCDR2, and HCDR3 of SEQ ID NOS:908-910, respectively, and optionally a heavy chain variable region having the sequence of SEQ ID NO:911 or 912, and sequences LCDR1, LCDR2, and LCDR3 of SEQ ID NOS:913-915, respectively, and optionally a light chain variable region having the sequence of SEQ ID NO:916 or 917.
89. The immune cell of any one of embodiments 1 to 30, wherein the ligand-binding module of the CSR binds to an FRα peptide.
90. The immune cell of embodiment 89, wherein the ligand-binding module of the CSR comprises:
(a) sequences of HCDR1, HCDR2, and HCDR3 of SEQ ID NOS:918-920, respectively, and optionally a heavy chain variable region having the sequence of SEQ ID NO:921, and sequences LCDR1, LCDR2, and LCDR3 of SEQ ID NOS:923-925, respectively, and optionally a light chain variable region having the sequence of SEQ ID NO:926.
91. The immune cell of any one of embodiments 1 to 30, wherein the ligand-binding module of the CSR binds to an EGFR peptide.
92. The immune cell of embodiment 91, wherein the ligand-binding module of the CSR comprises sequences of HCDR1, HCDR2, and HCDR3 of SEQ ID NOS:928-930, respectively, and optionally a heavy chain variable region having the sequence of SEQ ID NO:931, and sequences LCDR1, LCDR2, and LCDR3 of SEQ ID NOS:932-934, respectively, and optionally a light chain variable region having the sequence of SEQ ID NO:935; and optionally an scFv having the sequence of SEQ ID NO:936.
93. The immune cell of any one of embodiments 1 to 30, wherein the ligand-binding module of the CSR binds to an EGFRVIII peptide.
94. The immune cell of embodiment 93, wherein the ligand-binding module of the CSR comprises sequences of HCDR1, HCDR2, and HCDR3 of SEQ ID NOS:937-939, respectively, and optionally a heavy chain variable region having the sequence of SEQ ID NO:940, and sequences LCDR1, LCDR2, and LCDR3 of SEQ ID NOS:941-943, respectively, and optionally a light chain variable region having the sequence of SEQ ID NO:944.
95. The immune cell of any one of embodiments 1 to 30, wherein the ligand-binding module of the CSR binds to an HER3 peptide.
96. The immune cell of embodiment 95, wherein the ligand-binding module of the CSR comprises sequences of HCDR1, HCDR2, and HCDR3 of SEQ ID NOS:945-947, respectively, and optionally a heavy chain variable region having the sequence of SEQ ID NO:948, and sequences LCDR1, LCDR2, and LCDR3 of SEQ ID NOS:949-951, respectively, and optionally a light chain variable region having the sequence of SEQ ID NO:952, and optionally an scFv having the sequence of SEQ ID NO:953.
97. The immune cell of any one of embodiments 1 to 30, wherein the ligand-binding module of the CSR binds to a DLL3 peptide.
98. The immune cell of embodiment 97, wherein the ligand-binding module of the CSR comprises sequences of HCDR1, HCDR2, and HCDR3 of SEQ ID NOS:954-956, respectively, and optionally a heavy chain having the sequence of SEQ ID NO:957, and sequences LCDR1, LCDR2, and LCDR3 of SEQ ID NOS:958-960, respectively, and optionally a light chain having the sequence of SEQ ID NO:961.
99. The immune cell of any one of embodiments 1 to 30, wherein the ligand-binding module of the CSR binds to a c-Met peptide.
100. The immune cell of embodiment 99, wherein the ligand-binding module of the CSR comprises sequences of HCDR1, HCDR2, and HCDR3 of SEQ ID NOS:962-964, respectively, and optionally a heavy chain having the sequence of SEQ ID NO:965, and sequences LCDR1, LCDR2, and LCDR3 of SEQ ID NOS:966-968, respectively, and optionally a light chain having the sequence of SEQ ID NO: 969.
101. The immune cell of any one of embodiments 1 to 30, wherein the ligand-binding module of the CSR binds to a CD70 peptide.
102. The immune cell of embodiment 101, wherein the ligand-binding module of the CSR comprises sequences of HCDR1, HCDR2, and HCDR3 of SEQ ID NOS:970-972, respectively, and optionally a heavy chain variable region having the sequence of SEQ ID NO:973, and sequences LCDR1, LCDR2, and LCDR3 of SEQ ID NOS:974-976, respectively, and optionally a light chain having the sequence of SEQ ID NO:977.
103. The immune cell of any one of embodiments 1 to 102, wherein the CAR transmembrane domain is the transmembrane domain of CD30.
104. The immune cell of any one of embodiments 1 to 102, wherein the CAR transmembrane domain is the transmembrane domain of CD8.
105. The immune cell of any one of embodiments 1 to 104, wherein the CAR transmembrane domain and/or the CSR transmembrane domain is derived from the transmembrane domain of a TCR co-receptor or a T cell co-stimulatory molecule.
106. The immune cell of embodiment 105, wherein the TCR co-receptor or T cell co-stimulatory molecule is selected from the group consisting of CD8, 4-1BB, CD27, CD28, CD30, OX40, CD3ε, CD3ζ, CD45, CD4, CD5, CD9, CD16, CD22, CD33, CD37, CD64, CD80, CD86, CD134, CD137, and CD154.
107. The immune cell of embodiment 105 or 106, wherein the TCR co-receptor or T cell co-stimulatory molecule is CD30 or CD8.
108. The immune cell of embodiment 107, wherein the T cell co-stimulatory molecule is CD30.
109. The immune cell of embodiment 107, wherein the TCR co-receptor is CD8.
110. The immune cell of any one of embodiments 1 to 104, wherein the CAR transmembrane domain and/or the CSR transmembrane domain is the transmembrane domain of CD8, 4-1BB, CD27, CD28, CD30, OX40, CD3ε, CD3ζ, CD45, CD4, CD5, CD9, CD16, CD22, CD33, CD37, CD64, CD80, CD86, CD134, CD137, or CD154.
111. The immune cell of embodiment 110, wherein the CAR transmembrane domain and/or the CSR transmembrane domain is the transmembrane domain of CD30 or CD8.
112. The immune cell of embodiment 111, wherein the CAR transmembrane domain and/or the CSR transmembrane domain is the transmembrane domain of CD30.
113. The immune cell of embodiment 112, wherein the CSR transmembrane domain is the transmembrane domain of CD30.
114. The immune cell of embodiment 112, wherein the CAR transmembrane domain and/or the CSR transmembrane domain is the transmembrane domain of CD8.
115. The immune cell of any one of embodiments 1 to 114, wherein the CAR transmembrane domain and/or the CSR transmembrane domain comprises an amino acid sequence selected from the group consisting of SEQ ID NOS:66-71.
116. The immune cell of any one of embodiments 1 to 115, wherein the primary signaling domain comprises a sequence derived from the intracellular signaling sequence of a molecule selected from the group consisting of CD3ζ, TCRζ, FcRγ, FcRβ, CD3γ, CD3δ, CD3ε, CD5, CD22, CD79a, CD79b, and CD66d.
117. The immune cell of embodiment 116, wherein the primary signaling domain comprises a sequence derived from the intracellular signaling sequence of CD3ζ.
118. The immune cell of embodiment 116, wherein the primary signaling domain comprises the intracellular signaling sequence of CD3ζ.
119. The immune cell of any one of embodiments 1 to 118, wherein the primary signaling domain comprises a sequence that is at least 80%, 85%, 90%, 95%, or 100% identical to the sequence of SEQ ID NO:77.
120. The immune cell of any one of embodiments 1 to 119, further comprises a peptide linker between the extracellular target-binding domain and the transmembrane domain of the CAR.
121. The immune cell of any one of embodiments 1 to 120, further comprises a peptide linker between the transmembrane domain and the costimulatory domain of the CAR.
122. The immune cell of any one of embodiments 1 to 121, further comprises a peptide linker between the costimulatory domain and the primary signaling domain of the CAR.
123. The immune cell of any one of embodiments 1 to 122, further comprises a peptide linker between the ligand-binding module and the transmembrane domain of the CSR.
124. The immune cell of any one of embodiments 1 to 123, further comprises a peptide linker between the transmembrane domain and the CD30 costimulatory domain of the CSR.
125. The immune cell of any one of embodiments 1 to 124, wherein the expression of the CSR is inducible.
126. The immune cell of embodiment 125, wherein the expression of the CSR is inducible upon activation of the immune cell.
127. The immune cell of any one of embodiments 1 to 126, wherein the immune cell is selected from the group consisting of a cytotoxic T cell, a helper T cell, a natural killer T cell, and a suppressor T cell.
128. One or more nucleic acids encoding the CAR and CSR comprised by the immune cell of any one of embodiments 1 to 127, wherein the CAR and CSR each consist of one or more polypeptide chains encoded by the one or more nucleic acids.
129. One or more vectors comprising the one or more nucleic acids of embodiment 128.
130. A pharmaceutical composition comprising: (a) the immune cell of any one of embodiments 1 to 127, the nucleic acid(s) of embodiment 128, or the vector(s) of embodiment 129, and (b) a pharmaceutically acceptable carrier or diluent.
131. A method of killing target cells, comprising:
[0469] contacting one or more target cells with the immune cell of any one of embodiments 1 to 127 under conditions and for a time sufficient so that the immune cells mediate killing of the target cells,
   wherein the target cells express an antigen specific to the immune cell, and
   wherein the immune cell expresses a low cell exhaustion level upon contacting the target cells.
   132. The method of embodiment 131, wherein the immune cell expresses a low cell exhaustion level of an exhaustion marker selected from the group consisting of PD-1, TIM-3, TIGIT, and LAG-3.
   133. The method of embodiment 131 or 132, wherein the immune cell is a T cell.
   134. The method of any one of embodiments 131 to 133, wherein the immune cell expresses a low cell exhaustion level of PD-1.
   135. The method of any one of embodiments 131 to 133, wherein the immune cell expresses a low cell exhaustion level of TIM-3.
   136. The method of any one of embodiments 131 to 133, wherein the immune cell expresses a low cell exhaustion level of LAG-3.
   137. The method of any one of embodiments 131 to 133, wherein the immune cell expresses a low cell exhaustion level of TIGIT.
   138. The method of any one of embodiments 131 to 137, wherein the immune cell expresses a lower level of PD-1, TIM-3, TIGIT, or LAG-3 than corresponding immune cell expressing a CSR comprising a CD28 costimulatory domain.
   139. The method of embodiment 138, wherein the immune cell expresses a lower level of PD-1 than the corresponding CD28 CSR immune cell, and wherein the ratio of PD-1 expression level of the immune cell to the corresponding CD28 CSR immune cell is 0.9, 0.8, 0.7, 0.6, 0.5, 0.4, 0.3, 0.2, 0.1 or lower.
   140. The method of embodiment 138, wherein the immune cell expresses a lower level of TIM-3 than the corresponding CD28 CSR immune cell, and wherein the ratio of TIM-3 expression level of the immune cell to the corresponding CD28 CSR immune cell is 0.9, 0.8, 0.7, 0.6, 0.5, 0.4, 0.3, 0.2, 0.1 or lower.
   141. The method of embodiment 138, wherein the immune cell expresses a lower level of LAG-3 than the corresponding CD28 CSR immune cell, and wherein the ratio of LAG-3 expression level of the immune cell to the corresponding CD28 CSR immune cell is 0.9, 0.8, 0.7, 0.6, 0.5, 0.4, 0.3, 0.2, 0.1 or lower.
   142. The method of embodiment 138, wherein the immune cell expresses a lower level of TIGIT than the corresponding CD28 CSR immune cell, and wherein the ratio of TIGIT expression level of the immune cell to the corresponding CD28 CSR immune cell is 0.9, 0.8, 0.7, 0.6, 0.5, 0.4, 0.3, 0.2, 0.1 or lower.
   143. The method of any one of embodiments 131 to 137, wherein the immune cell expresses a lower level of PD-1, TIM-3, TIGIT, or LAG-3 than corresponding immune cell expressing a CSR comprising a 4-1BB costimulatory domain.
   144. The method of embodiment 143, wherein the immune cell expresses a lower level of PD-1 than the corresponding 4-1BB CSR immune cell, and wherein the ratio of PD-1 expression level of the immune cell to the corresponding 4-1BB CSR immune cell is 0.9, 0.8, 0.7, 0.6, 0.5, 0.4, 0.3, 0.2, 0.1 or lower.
   145. The method of embodiment 143, wherein the immune cell expresses a lower level of TIM-3 than the corresponding 4-1BB CSR immune cell, and wherein the ratio of TIM-3 expression level of the immune cell to the corresponding 4-1BB CSR immune cell is 0.9, 0.8, 0.7, 0.6, 0.5, 0.4, 0.3, 0.2, 0.1 or lower.
   146. The method of embodiment 143, wherein the immune cell expresses a lower level of LAG-3 than the corresponding 4-1BB CSR immune cell, and wherein the ratio of LAG-3 expression level of the immune cell to the corresponding 4-1BB CSR immune cell is 0.9, 0.8, 0.7, 0.6, 0.5, 0.4, 0.3, 0.2, 0.1 or lower.
   147. The method of embodiment 143, wherein the immune cell expresses a lower level of TIGIT than the corresponding 4-1BB CSR immune cell, and wherein the ratio of TIGIT expression level of the immune cell to the corresponding 4-1BB CSR immune cell is 0.9, 0.8, 0.7, 0.6, 0.5, 0.4, 0.3, 0.2, 0.1 or lower.
   148. The method of any one of embodiments 131 to 147, wherein the target cells are cancer cells.
   149. The method of embodiment 148, wherein the cancer cells are from a cancer selected from the group consisting of adrenocortical carcinoma, bladder cancer, breast cancer, cervical cancer, cholangiocarcinoma, colorectal cancers, esophageal cancer, glioblastoma, glioma, hepatocellular carcinoma, head and neck cancer, kidney cancer, leukemia, lymphoma, lung cancer, melanoma, mesothelioma, multiple myeloma, pancreatic cancer, pheochromocytoma, plasmacytoma, neuroblastoma, ovarian cancer, prostate cancer, sarcoma, stomach cancer, uterine cancer, and thyroid cancer.
   150. The method of embodiment 147 or 148, wherein the cancer cells are hematological cancer cells.
   151. The method of embodiment 147 or 148, wherein the cancer cells are solid tumor cells.
   152. The method of any one of embodiments 131 to 147, wherein the target cells are virus-infected cells.
   153. The method of embodiment 152, wherein the virus-infected cells are from a viral infection caused by a virus selected from the group consisting of Cytomegalovirus (CMV), Epstein-Barr Virus (EBV), Hepatitis B Virus (HBV), Kaposi's Sarcoma associated herpesvirus (KSHV), Human papillomavirus (HPV), Molluscum contagiosum virus (MCV), Human T cell leukemia virus 1 (HTLV-1), HIV (Human immunodeficiency virus), and Hepatitis C Virus (HCV).
   154. A method of treating a disease, the method comprising a step of administering to a subject the immune cell of any one of embodiments 1 to 127, the nucleic acid(s) of embodiment 128, or the vector(s) of embodiment 129, or the pharmaceutical composition of embodiment 130 to the subject.
   155. The method of embodiment 154, wherein the disease is a viral infection.
   156. The method of embodiment 154, wherein the disease is cancer.
   157. The method of embodiment 156, wherein the cancer is a hematological cancer.
   158. The method of embodiment 156, wherein the cancer is a solid tumor cancer.
   159. The method of embodiment 158, wherein the subject has a higher density of the immune cell of any one of embodiments 1 to 127 in the solid tumor cancer than in the rest of the subject's body.
   160. The method of any one of embodiments 154 to 159, wherein the subject has a higher density of the immune cell of any one of embodiments 1 to 127 in the peripheral blood of the subject as compared to treating the same type of disease with same number of immune cells expressing the same CAR and a corresponding CSR comprising a CD28 or 4-1BB costimulatory domain.
   161. The method of any one of embodiments 154 to 159, wherein the cancer is selected from the group consisting of adrenocortical carcinoma, bladder cancer, breast cancer, cervical cancer, cholangiocarcinoma, colorectal cancers, esophageal cancer, glioblastoma, glioma, hepatocellular carcinoma, head and neck cancer, kidney cancer, leukemia, lymphoma, lung cancer, melanoma, mesothelioma, multiple myeloma, pancreatic cancer, pheochromocytoma, plasmacytoma, neuroblastoma, ovarian cancer, prostate cancer, sarcoma, stomach cancer, uterine cancer, and thyroid cancer.
   162. A method for preventing and/or reversing T cell exhaustion in a subject, comprising administering to the subject the nucleic acid(s) of embodiment 128, or the vector(s) of embodiment 129, or the pharmaceutical composition of embodiment 130 comprising the nucleic acid(s) or the vector(s) to the subject.
   163. The method of embodiment 162, wherein the method decreases the expression of an exhaustion marker in a T cell.
   164. The method of embodiment 162 or 163, wherein the exhaustion marker is selected from the group consisting of PD-1, TIM-3, TIGIT, and LAG-3.
   165. A method of treating a solid tumor cancer in a subject with increased tumor infiltration as compared to treating the same type of solid tumor cancer with immune cells expressing a CAR and a CSR comprising a CD28 or 4-1BB costimulatory domain, wherein the method comprises administering to the subject corresponding immune cells expressing the same CAR and a corresponding CSR comprising a CD30 costimulatory domain, and wherein the corresponding immune cells comprise the immune cell of any one of embodiments 1 to 127.
   166. A method of treating a solid tumor cancer in a subject with increased tumor regression as compared to treating the same type of solid tumor cancer with immune cells expressing a CAR and a CSR comprising a CD28 or 4-1BB costimulatory domain, wherein the method comprises administering to the subject corresponding immune cells expressing the same CAR and a corresponding CSR comprising a CD30 costimulatory domain, and wherein the corresponding immune cells comprise the immune cell of any one of embodiments 1 to 127.
   167. A method for generating central memory T cells in a subject, comprising administering to the subject the nucleic acid(s) of embodiment 128, or the vector(s) of embodiment 129, or the pharmaceutical composition of embodiment 130 comprising the nucleic acid(s) or the vector(s) to the subject.
   168. The method of embodiment 167, wherein the method increases the number of central memory T cells and/or the percentage of central memory T cells among all T cells in the subject.
   169. A method for generating central memory T cells in vitro comprising: contacting one or more target cells with the immune cell of any one of embodiments 1 to 127 under conditions and for a time sufficient so that the immune cell develops into central memory T cells, wherein the target cells express an antigen specific to the immune cell.
   170. The method of embodiment 169, wherein the method increases the number of central memory T cells and/or the percentage of central memory T cells among all T cells descended from the immune cell.
   171. The method of embodiment 169 or 170, wherein the method generates higher number of central memory T cells and/or higher percentage of central memory T cells than corresponding immune cell expressing a CSR comprising a CD28 costimulatory domain.
   172. The method of embodiment 171, wherein the method generates at least 10%, 20%, 30%, 40%, 50%, 60%, 70%, 80%, 90%, 100%, 200%, 300%, 400%, or 500% higher number of central memory T cells and/or percentage of central memory T cells than corresponding immune cell expressing a CSR comprising a CD28 costimulatory domain.
   173. The method of any one of embodiments 169 to 172, wherein the central memory T cells express high levels of CCR7 and low levels of CD45RA.
   174. The method of any one of embodiments 169 to 173, wherein the central memory T cells are CD8+ T cells.

INFORMAL SEQUENCE LISTING

| SEQ | | |
|---|---|---|
| ID | | |
| NO. | Sequence | Notes |
| 1 | METDTLLLWVLLLWVPGSTGQSVLTQPASVSGSPGQSITISCTGTSSDVGGYNYVSW | 1st -gen αAFP-CD8T- |
| | YQQHPGKAPKLMIYDVNNRPSEVSNRFSGSKSGNTASLTISGLQAEDEADYYCSSYTT | Z-CAR |
| | GSRAVFGGGTKLTVLGSRGGGGSGGGGSGGGGSLEMAEVQLVQSGAEVKKPGESLTI | Signal peptide- AFP |
| | SCKASGYSFPNYWITWVRQMSGGGLEWMGRIDPGDSYTTYNPSFQGHVTISIDKSTN | scFv-myc tag-linker- |
| | TAYLHWNSLKASDTAMYYCARYYVSLVDIWGQGTLVTVSSEQKLISEEDLAAATGT | CD8T-CD3z |
| | TTPAPRPPTPAPTIASQPLSLRPEACRPAAGGAVHTRGLDFACDIYIWAPLAGTCGVLL | |
| | LSLVITLYCRVKFSRSADAPAYQQGQNQLYNELNLGRREEYDVLDKRRGRDPEMGG | |
| | KPRRKNPQEGLYNELQKDKMAEAYSEIGMKGERRRGKGHDGLYQGLSTATKDTYD | |
| | ALHMQALPPR | |
| 2 | METDTLLLWVLLLWVPGSTGLPVLTQPPSVSVAPGKTARITCGGNNIGSKSVHWYQQ | 1st -gen αCD19- |
| | KPGQAPVLVVYDDSDRPSGIPERFSGSNSGNTATLTISRVEAGDEADYYCQVWDSSSD | CD8T-Z-CAR |
| | YVVFGGGTKLTVLGSRGGGGSGGGGSGGGGSLEMAEVQLVQSGAEVKKPGESLKIS | Signal peptide- CD19 |
| | CKGSGYSFTSYWIGWVRQMPGKGLEWMGIIYPGDSDTRYSPSFQGQVTISADKSISTA | scFv-myc tag-linker- |
| | YLQWSSLKASDTAMYYCARQVWGWQGGMYPRSNWWYNLDSWGQGTLVTVSSEQ | CD8T-CD3z |
| | KLISEEDLAAATGTTTPAPRPPTPAPTIASQPLSLRPEACRPAAGGAVHTRGLDFACDIY | |
| | IWAPLAGTCGVLLLSLVITLYCRVKFSRSADAPAYQQGQNQLYNELNLGRREEYDVL | |
| | DKRRGRDPEMGGKPRRKNPQEGLYNELQKDKMAEAYSEIGMKGERRRGKGHDGLY | |
| | QGLSTATKDTYDALHMQALPPR | |
| 3 | METDTLLLWVLLLWVPGSTGLPVLTQPPSVSVAPGKTARITCGGNNIGSKSVHWYQQ | 2^{nd}-gen |
| | KPGQAPVLVVYDDSDRPSGIPERFSGSNSGNTATLTISRVEAGDEADYYCQVWDSSSD | Anti-CD19-CD28z- |
| | YVVFGGGTKLTVLGSRGGGGSGGGGSGGGGSLEMAEVQLVQSGAEVKKPGESLKIS | CAR |
| | CKGSGYSFTSYWIGWVRQMPGKGLEWMGIIYPGDSDTRYSPSFQGQVTISADKSISTA | |
| | YLQWSSLKASDTAMYYCARQVWGWQGGMYPRSNWWYNLDSWGQGTLVTVSSEQ | |
| | KLISEEDLAAAIEVMYPPPYLDNEKSNGTIIHVKGKHLCPSPLFPGPSKPFWVLVVVGG | |
| | VLACYSLLVTVAFIIFWVRSKRSRLLHSDYMNMTPRRPGPTRKHYQPYAPPRDFAAY | |
| | RSRVKFSRSADAPAYQQGQNQLYNELNLGRREEYDVLDKRRGRDPEMGGKPRRKNP | |
| | QEGLYNELQKDKMAEAYSEIGMKGERRRGKGHDGLYQGLSTATKDTYDALHMQAL | |
| | PPR | |
| 4 | METDTLLLWVLLLWVPGSTGLPVLTQPPSVSVAPGKTARITCGGNNIGSKSVHWYQQ | 2^{nd}-gen |
| | KPGQAPVLVVYDDSDRPSGIPERFSGSNSGNTATLTISRVEAGDEADYYCQVWDSSSD | Anti-CD19-CD30z- |
| | YVVFGGGTKLTVLGSRGGGGSGGGGSGGGGSLEMAEVQLVQSGAEVKKPGESLKIS | CAR |
| | CKGSGYSFTSYWIGWVRQMPGKGLEWMGIIYPGDSDTRYSPSFQGQVTISADKSISTA | |
| | YLQWSSLKASDTAMYYCARQVWGWQGGMYPRSNWWYNLDSWGQGTLVTVSSEQ | |
| | KLISEEDLAAATGAPPLGTQPDCNPTPENGEAPASTSPTQSLLVDSQASKTLPIPTSAPV | |
| | ALSSTGKPVLDAGPVLFWVILVLVVVVGSSAFLLCHRRACRKRIRQKLHLCYPVQTSQ | |
| | PKLELVDSRPRRSSTQLRSGASVTEPVAEERGLMSQPLMETCHSVGAAYLESLPLQDA | |
| | SPAGGPSSPRDLPEPRVSTEHTNNKIEKIVEVIKADTVIVGTVKAELPEGRGLAGPAEPE | |
| | LEEELEADHTPHYPEQETEPPLGSCSDVMLSVEEEGKEDPLPTAASGKRVKFSRSADA | |
| | PAYQQGQNQLYNELNLGRREEYDVLDKRRGRDPEMGGKPRRKNPQEGLYNELQKD | |
| | KMAEAYSEIGMKGERRRGKGHDGLYQGLSTATKDTYDALHMQALPPR | |
| 5 | METDTLLLWVLLLWVPGSTGLPVLTQPPSVSVAPGKTARITCGGNNIGSKSVHWYQQ | 2^{nd}-gen |
| | KPGQAPVLVVYDDSDRPSGIPERFSGSNSGNTATLTISRVEAGDEADYYCQVWDSSSD | Anti-CD19-CD8T- |
| | YVVFGGGTKLTVLGSRGGGGSGGGGSGGGGSLEMAEVQLVQSGAEVKKPGESLKIS | CD30z-CAR |
| | CKGSGYSFTSYWIGWVRQMPGKGLEWMGIIYPGDSDTRYSPSFQGQVTISADKSISTA | |
| | YLQWSSLKASDTAMYYCARQVWGWQGGMYPRSNWWYNLDSWGQGTLVTVSSEQ | |
| | KLISEEDLAAATGTTTPAPRPPTPAPTIASQPLSLRPEACRPAAGGAVHTRGLDFACDIY | |
| | IWAPLAGTCGVLLLSLVITLYCHRRACRKRIRQKLHLCYPVQTSQPKLELVDSRPRRSS | |
| | TQLRSGASVTEPVAEERGLMSQPLMETCHSVGAAYLESLPLQDASPAGGPSSPRDLPE | |
| | PRVSTEHTNNKIEKIYIMKADTVIVGTVKAELPEGRGLAGPAEPELEEELEADHTPHYP | |
| | EQETEPPLGSCSDVMLSVEEEGKEDPLPTAASGKRVKFSRSADAPAYQQGQNQLYNE | |
| | LNLGRREEYDVLDKRRGRDPEMGGKPRRKNPQEGLYNELQKDKMAEAYSEIGMKG | |
| | ERRRGKGHDGLYQGLSTATKDTYDALHMQALPPR | |
| 6 | METDTLLLWVLLLWVPGSTGLPVLTQPPSVSVAPGKTARITCGGNNIGSKSVHWYQQ | 2^{nd}-gen |
| | KPGQAPVLVVYDDSDRPSGIPERFSGSNSGNTATLTISRVEAGDEADYYCQVWDSSSD | Anti-CD19-CD8T- |
| | YVVFGGGTKLTVLGSRGGGGSGGGGSGGGGSLEMAEVQLVQSGAEVKKPGESLKIS | 41BBz-CAR |
| | CKGSGYSFTSYWIGWVRQMPGKGLEWMGIIYPGDSDTRYSPSFQGQVTISADKSISTA | |
| | YLQWSSLKASDTAMYYCARQVWGWQGGMYPRSNWWYNLDSWGQGTLVTVSSEQ | |
| | KLISEEDLTGTTTPAPRPPTPAPTIASQPLSLRPEACRPAAGGAVHTRGLDFACDIYIWA | |
| | PLAGTCGVLLLSLVITLYCKRGRKKLLYIFKQPFMRPVQTTQEEDGCSCRFPEEEEGGC | |
| | ELRVKFSRSADAPAYQQGQNQLYNELNLGRREEYDVLDKRRGRDPEMGGKPRRKNP | |
| | QEGLYNELQKDKMAEAYSEIGMKGERRRGKGHDGLYQGLSTATKDTYDALHMQAL | |
| | PPR | |
| 7 | METDTLLLWVLLLWVPGSTGQSVLTQPASVSGSPGQSITISCTGTSSDVGGYNYVSW | 2^{nd}-gen |
| | YQQHPGKAPKLMIYDVNNRPSEVSNRFSGSKSGNTASLTISGLQAEDEADYYCSSYTT | Anti-AFP-CD28z- |
| | GSRAVFGGGTKLTVLGSRGGGGSGGGGSGGGGSLEMAEVQLVQSGAEVKKPGESLTI | CAR |
| | SCKASGYSFPNYWITWVRQMSGGGLEWMGRIDPGDSYTTYNPSFQGHVTISIDKSTN | |
| | TAYLHWNSLKASDTAMYYCARYYVSLVDIWGQGTLVTVSSEQKLISEEDLAAAIEV | |
| | MYPPPYLDNEKSNGTIIHVKGKHLCPSPLFPGPSKPFWVLVVVGGVLACYSLLVTVAF | |
| | IIFWVRSKRSRLLHSDYMNMTPRRPGPTRKHYQPYAPPRDFAAYRSRVKFSRSADAPA | |
| | YQQGQNQLYNELNLGRREEYDVLDKRRGRDPEMGGKPRRKNPQEGLYNELQKDKM | |
| | AEAYSEIGMKGERRRGKGHDGLYQGLSTATKDTYDALHMQALPPR | |
| 8 | METDTLLLWVLLLWVPGSTGQSVLTQPASVSGSPGQSITISCTGTSSDVGGYNYVSW | 2^{nd}-gen |
| | YQQHPGKAPKLMIYDVNNRPSEVSNRFSGSKSGNTASLTISGLQAEDEADYYCSSYTT | Anti-AFP-CD30z- |
| | GSRAVFGGGTKLTVLGSRGGGGSGGGGSGGGGSLEMAEVQLVQSGAEVKKPGESLTI | CAR |
| | SCKASGYSFPNYWITWVRQMSGGGLEWMGRIDPGDSYTTYNPSFQGHVTISIDKSTN | |
| | TAYLHWNSLKASDTAMYYCARYYVSLVDIWGQGTLVTVSSEQKLISEEDLAAATGA | |
| | PPLGTQPDCNPTPENGEAPASTSPTQSLLVDSQASKTLPIPTSAPVALSSTGKPVLDAGP | |
| | VLFWVILVLVVVVGSSAFLLCHRRACRKRIRQKLHLCYPVQTSQPKLELVDSRPRRSS | |
| | TQLRSGASVTEPVAEERGLMSQPLMETCHSVGAAYLESLPLQDASPAGGPSSPRDLPE | |
| | PRVSTEHTNNKIEKIYEVIKADTVIVGTVKAELPEGRGLAGPAEPELEEELEADHTPHYP | |
| | EQETEPPLGSCSDVMLSVEEEGKEDPLPTAASGKRVKFSRSADAPAYQQGQNQLYNE | |
| | LNLGRREEYDVLDKRRGRDPEMGGKPRRKNPQEGLYNELQKDKMAEAYSEIGMKG | |
| | ERRRGKGHDGLYQGLSTATKDTYDALHMQALPPR | |
| 9 | METDTLLLWVLLLWVPGSTGQSVLTQPASVSGSPGQSITISCTGTSSDVGGYNYVSW | 2^{nd}-gen |
| | YQQHPGKAPKLMIYDVNNRPSEVSNRFSGSKSGNTASLTISGLQAEDEADYYCSSYTT | AFP-CD8T-CD30z- |
| | GSRAVFGGGTKLTVLGSRGGGGSGGGGSGGGGSLEMAEVQLVQSGAEVKKPGESLTI | CAR |
| | SCKASGYSFPNYWITWVRQMSGGGLEWMGRIDPGDSYTTYNPSFQGHVTISIDKSTN | |
| | TAYLHWNSLKASDTAMYYCARYYVSLVDIWGQGTLVTVSSEQKLISEEDLAAATGT | |
| | TTPAPRPPTPAPTIASQPLSLRPEACRPAAGGAVHTRGLDFACDIYIWAPLAGTCGVLL | |
| | LSLVITLYCHRRACRKRIRQKLHLCYPVQTSQPKLELVDSRPRRSSTQLRSGASVTEPV | |
| | AEERGLMSQPLMETCHSVGAAYLESLPLQDASPAGGPSSPRDLPEPRVSTEHTNNKIE | |
| | KIYIMKADTVIVGTVKAELPEGRGLAGPAEPELEEELEADHTPHYPEQETEPPLGSCSD | |
| | VMLSVEEEGKEDPLPTAASGKRVKFSRSADAPAYQQGQNQLYNELNLGRREEYDVL | |
| | DKRRGRDPEMGGKPRRKNPQEGLYNELQKDKMAEAYSEIGMKGERRRGKGHDGLY | |
| | QGLSTATKDTYDALHMQALPPR | |
| 10 | METDTLLLWVLLLWVPGSTGQSVLTQPASVSGSPGQSITISCTGTSSDVGGYNYVSW | 2^{nd}-gen |
| | YQQHPGKAPKLMIYDVNNRPSEVSNRFSGSKSGNTASLTISGLQAEDEADYYCSSYTT | Anti-AFP-CD8T- |
| | GSRAVFGGGTKLTVLGSRGGGGSGGGGSGGGGSLEMAEVQLVQSGAEVKKPGESLTI | 41BBz-CAR |
| | SCKASGYSFPNYWITWVRQMSGGGLEWMGRIDPGDSYTTYNPSFQGHVTISIDKSTN | |
| | TAYLHWNSLKASDTAMYYCARYYVSLVDIWGQGTLVTVSSEQKLISEEDLTGTTTPA | |
| | PRPPTPAPTIASQPLSLRPEACRPAAGGAVHTRGLDFACDIYIWAPLAGTCGVLLLSLVI | |
| | TLYCKRGRKKLLYIFKQPFMRPVQTTQEEDGCSCRFPEEEEGGCELRVKFSRSADAPA | |
| | YQQGQNQLYNELNLGRREEYDVLDKRRGRDPEMGGKPRRKNPQEGLYNELQKDKM | |
| | AEAYSEIGMKGERRRGKGHDGLYQGLSTATKDTYDALHMQALPPR | |
| 11 | METDTLLLWVLLLWVPGSTGLPVLTQPPSVSVAPGKTARITCGGNNIGSKSVHWYQQ | 2^{nd}-gen |
| | KPGQAPVLVVYDDSDRPSGIPERFSGSNSGNTATLTISRVEAGDEADYYCQVWDSSSD | Anti-CD19-CD8T- |
| | YVVFGGGTKLTVLGSRGGGGSGGGGSGGGGSLEMAEVQLVQSGAEVKKPGESLKIS | CD28z-CAR |
| | CKGSGYSFTSYWIGWVRQMPGKGLEWMGIIYPGDSDTRYSPSFQGQVTISADKSISTA | |
| | YLQWSSLKASDTAMYYCARQVWGWQGGMYPRSNWWYNLDSWGQGTLVTVSSEQ | |
| | KLISEEDLTGTTTPAPRPPTPAPTIASQPLSLRPEACRPAAGGAVHTRGLDFACDIYIWA | |
| | PLAGTCGVLLLSLVITLYCRSKRSRLLHSDYMNMTPRRPGPTRKHYQPYAPPRDFAAY | |
| | RSRVKFSRSADAPAYQQGQNQLYNELNLGRREEYDVLDKRRGRDPEMGGKPRRKNP | |
| | QEGLYNELQKDKMAEAYSEIGMKGERRRGKGHDGLYQGLSTATKDTYDALHMQAL | |
| | PPR | |
| 12 | METDTLLLWVLLLWVPGSTGQSVLTQPASVSGSPGQSITISCTGTSSDVGGYNYVSW | 2^{nd}-gen |
| | YQQHPGKAPKLMIYDVNNRPSEVSNRFSGSKSGNTASLTISGLQAEDEADYYCSSYTT | Anti-AFP-CD8T- |
| | GSRAVFGGGTKLTVLGSRGGGGSGGGGSGGGGSLEMAEVQLVQSGAEVKKPGESLTI | CD28z-CAR |
| | SCKASGYSFPNYWITWVRQMSGGGLEWMGRIDPGDSYTTYNPSFQGHVTISIDKSTN | |
| | TAYLHWNSLKASDTAMYYCARYYVSLVDIWGQGTLVTVSSEQKLISEEDLAAATGT | |
| | TTPAPRPPTPAPTIASQPLSLRPEACRPAAGGAVHTRGLDFACDIYIWAPLAGTCGVLL | |
| | LSLVITLYCAAARSKRSRLLHSDYMNMTPRRPGPTRKHYQPYAPPRDFAAYRSRVKF | |
| | SRSADAPAYQQGQNQLYNELNLGRREEYDVLDKRRGRDPEMGGKPRRKNPQEGLY | |
| | NELQKDKMAEAYSEIGMKGERRRGKGHDGLYQGLSTATKDTYDALHMQALPPR | |
| 13 | METDTLLLWVLLLWVPGSTGQSVLTQPPSVSAAPGQRVTISCSGTRSNIGSDYVSWY | αGPC3-CD30-CSR |
| | QHLPGTAPKLLVYGDNLRPSGIPDRFSASKSGTSATLGITGLQTGDEADYYCGTWDYT | Signal peptide-GPC3- |
| | LNGVVFGGGTKLTVLGSRGGGGSGGGGSGGGGSLEMAQVQLVESGGGLVQPGGSLR | 37 scFv-myc tag- |
| | LSCAASGFTFSSYAMSWVRQAPGKGLEWVSVIYSGGSSTYYADSVKGRFTISRDNSK | linker-truncated CD30 |
| | NTLYLQMNSLRAEDTAVYYCARTSYLNHGDYWGQGTLVTVSSEQKLISEEDLAAAT | (clone 37 anti-GPC3- |
| | GAPPLGTQPDCNPTPENGEAPASTSPTQSLLVDSQASKTLPIPTSAPVALSSTGKPVLD | CD30-CSR with SP |
| | AGPVLFWVILVLVVVVGSSAFLLCHRRACRKRIRQKLHLCYPVQTSQPKLELVDSRPR | and myc tag) |
| | RSSTQLRSGASVTEPVAEERGLMSQPLMETCHSVGAAYLESLPLQDASPAGGPSSPRD | |
| | LPEPRVSTEHTNNKIEKIYEMKADTVIVGTVKAELPEGRGLAGPAEPELEEELEADHTP | |
| | HYPEQETEPPLGSCSDVMLSVEEEGKEDPLPTAASGK | |
| 14 | METDTLLLWVLLLWVPGSTGQSVLTQPPSVSAAPGQRVTISCSGTRSNIGSDYVSWY | αGPC3-CD28-CSR |
| | QHLPGTAPKLLVYGDNLRPSGIPDRFSASKSGTSATLGITGLQTGDEADYYCGTWDYT | Signal peptide-GPC3- |
| | LNGVVFGGGTKLTVLGSRGGGGSGGGGSGGGGSLEMAQVQLVESGGGLVQPGGSLR | 37 scFv-myc tag- |
| | LSCAASGFTFSSYAMSWVRQAPGKGLEWVSVIYSGGSSTYYADSVKGRFTISRDNSK | linker-truncated CD28 |
| | NTLYLQMNSLRAEDTAVYYCARTSYLNHGDYWGQGTLVTVSSEQKLISEEDLAAAIE | |
| | VMYPPPYLDNEKSNGTIIHVKGKHLCPSPLFPGPSKPFWVLVVVGGVLACYSLLVTVA | |
| | FIIFWVRSKRSRLLHSDYMNMTPRRPGPTRKHYQPYAPPRDFAAYRS | |
| 15 | METDTLLLWVLLLWVPGSTGQSVLTQPPSVSAAPGQRVTISCSGTRSNIGSDYVSWY | αGPC3-41BB-CSR |
| | QHLPGTAPKLLVYGDNLRPSGIPDRFSASKSGTSATLGITGLQTGDEADYYCGTWDYT | Signal peptide-GPC3- |
| | LNGVVFGGGTKLTVLGSRGGGGSGGGGSGGGGSLEMAQVQLVESGGGLVQPGGSLR | 37 scFv-myc tag- |
| | LSCAASGFTFSSYAMSWVRQAPGKGLEWVSVIYSGGSSTYYADSVKGRFTISRDNSK | linker-truncated 41BB |
| | NTLYLQMNSLRAEDTAVYYCARTSYLNHGDYWGQGTLVTVSSEQKLISEEDLAAAT | |
| | GPADLSPGASSVTPPAPAREPGHSPQIISFFLALTSTALLFLLFFLTLRFSVVKRGRKKLL | |
| | YIFKQPFMRPVQTTQEEDGCSCRFPEEEEGGCEL | |
| 16 | METDTLLLWVLLLWVPGSTGQSVLTQPPSVSAAPGQRVTISCSGTRSNIGSDYVSWY | αGPC3-OX40-CSR |
| | QHLPGTAPKLLVYGDNLRPSGIPDRFSASKSGTSATLGITGLQTGDEADYYCGTWDYT | Signal peptide-GPC3- |
| | LNGVVFGGGTKLTVLGSRGGGGSGGGGSGGGGSLEMAQVQLVESGGGLVQPGGSLR | 37 scFv-myc tag- |
| | LSCAASGFTFSSYAMSWVRQAPGKGLEWVSVIYSGGSSTYYADSVKGRFTISRDNSK | linker-truncated OX40 |
| | NTLYLQMNSLRAEDTAVYYCARTSYLNHGDYWGQGTLVTVSSEQKLISEEDLAAAT | |
| | GDRDPPATQPQETQGPPARPITVQPTEAWPRTSQGPSTRPVEVPGGRAVAAILGLGLV | |
| | LGLLGPLAILLALYLLRRDQRLPPDAHKPPGGGSFRTPIQEEQADAHSTLAKI | |
| 17 | METDTLLLWVLLLWVPGSTGQSVLTQPPSVSAAPGQRVTISCSGTRSNIGSDYVSWY | αGPC3-CD27-CSR |
| | QHLPGTAPKLLVYGDNLRPSGIPDRFSASKSGTSATLGITGLQTGDEADYYCGTWDYT | Signal peptide-GPC3- |
| | LNGVVFGGGTKLTVLGSRGGGGSGGGGSGGGGSLEMAQVQLVESGGGLVQPGGSLR | 37 scFv-myc tag- |
| | LSCAASGFTFSSYAMSWVRQAPGKGLEWVSVIYSGGSSTYYADSVKGRFTISRDNSK | linker-trucated CD27 |
| | NTLYLQMNSLRAEDTAVYYCARTSYLNHGDYWGQGTLVTVSSEQKLISEEDLAAAT | |
| | GPTHLPYVSEMLEARTAGHMQTLADFRQLPARTLSTHWPPQRSLCSSDFIRILVIFSGM | |
| | FLVFTLAGALFLHQRRKYRSNKGESPVEPAEPCRYSCPREEEGSTIPIQEDYRKPEPACS | |
| | P | |
| 18 | METDTLLLWVLLLWVPGSTGQSVLTQPPSVSAAPGQRVTISCSGTRSNIGSDYVSWY | αGPC3-CD30T-CD28- |
| | QHLPGTAPKLLVYGDNLRPSGIPDRFSASKSGTSATLGITGLQTGDEADYYCGTWDYT | CSR |
| | LNGVVFGGGTKLTVLGSRGGGGSGGGGSGGGGSLEMAQVQLVESGGGLVQPGGSLR | Signal peptide-GPC3- |
| | LSCAASGFTFSSYAMSWVRQAPGKGLEWVSVIYSGGSSTYYADSVKGRFTISRDNSK | 37 scFv-myc tag- |
| | NTLYLQMNSLRAEDTAVYYCARTSYLNHGDYWGQGTLVTVSSEQKLISEEDLAAAT | linker- CD30T-CD28 |
| | GAPPLGTQPDCNPTPENGEAPASTSPTQSLLVDSQASKTLPIPTSAPVALSSTGKPVLD | IC |
| | AGPVLFWVILVLVVVVGSSAFLLCRSKRSRLLHSDYMNMTPRRPGPTRKHYQPYAPP | |
| | RDFAAYRS | |
| 19 | METDTLLLWVLLLWVPGSTGQSVLTQPPSVSAAPGQRVTISCSGTRSNIGSDYVSWY | αGPC3-CD30T-41BB- |
| | QHLPGTAPKLLVYGDNLRPSGIPDRFSASKSGTSATLGITGLQTGDEADYYCGTWDYT | CSR |
| | LNGVVFGGGTKLTVLGSRGGGGSGGGGSGGGGSLEMAQVQLVESGGGLVQPGGSLR | Signal peptide-GPC3- |
| | LSCAASGFTFSSYAMSWVRQAPGKGLEWVSVIYSGGSSTYYADSVKGRFTISRDNSK | 37 scFv-myc tag- |
| | NTLYLQMNSLRAEDTAVYYCARTSYLNHGDYWGQGTLVTVSSEQKLISEEDLAAAT | linker- CD30T-41BB |
| | GAPPLGTQPDCNPTPENGEAPASTSPTQSLLVDSQASKTLPIPTSAPVALSSTGKPVLD | IC |
| | AGPVLFWVILVLVVVVGSSAFLLCKRGRKKLLYIFKQPFMRPVQTTQEEDGCSCRFPE | |
| | EEEGGCEL | |
| 20 | METDTLLLWVLLLWVPGSTGQSVLTQPPSVSAAPGQRVTISCSGTRSNIGSDYVSWY | αGPC3-CD30T-OX40- |
| | QHLPGTAPKLLVYGDNLRPSGIPDRFSASKSGTSATLGITGLQTGDEADYYCGTWDYT | CSR |
| | LNGVVFGGGTKLTVLGSRGGGGSGGGGSGGGGSLEMAQVQLVESGGGLVQPGGSLR | Signal peptide-GPC3- |
| | LSCAASGFTFSSYAMSWVRQAPGKGLEWVSVIYSGGSSTYYADSVKGRFTISRDNSK | 37 scFv-myc tag- |
| | NTLYLQMNSLRAEDTAVYYCARTSYLNHGDYWGQGTLVTVSSEQKLISEEDLAAAT | linker- CD30T-OX40 |
| | GAPPLGTQPDCNPTPENGEAPASTSPTQSLLVDSQASKTLPIPTSAPVALSSTGKPVLD | IC |
| | AGPVLFWVILVLVVVVGSSAFLLCALYLLRRDQRLPPDAHKPPGGGSFRTPIQEEQAD | |
| | AHSTLAKI | |
| 21 | METDTLLLWVLLLWVPGSTGQSVLTQPPSVSAAPGQRVTISCSGTRSNIGSDYVSWY | αGPC3-CD30T-CD27- |
| | QHLPGTAPKLLVYGDNLRPSGIPDRFSASKSGTSATLGITGLQTGDEADYYCGTWDYT | CSR |
| | LNGVVFGGGTKLTVLGSRGGGGSGGGGSGGGGSLEMAQVQLVESGGGLVQPGGSLR | Signal peptide-GPC3- |
| | LSCAASGFTFSSYAMSWVRQAPGKGLEWVSVIYSGGSSTYYADSVKGRFTISRDNSK | 37 scFv-myc tag- |
| | NTLYLQMNSLRAEDTAVYYCARTSYLNHGDYWGQGTLVTVSSEQKLISEEDLAAAT | linker- CD30T-CD27 |
| | GAPPLGTQPDCNPTPENGEAPASTSPTQSLLVDSQASKTLPIPTSAPVALSSTGKPVLD | IC |
| | AGPVLFWVILVLVVVVGSSAFLLCQRRKYRSNKGESPVEPAEPCRYSCPREEEGSTIPI | |
| | QEDYRKPEPACSP | |
| 22 | METDTLLLWVLLLWVPGSTGQSVLTQPPSVSAAPGQRVTISCSGTRSNIGSDYVSWY | αGPC3-CD28T-CD30- |
| | QHLPGTAPKLLVYGDNLRPSGIPDRFSASKSGTSATLGITGLQTGDEADYYCGTWDYT | CSR |
| | LNGVVFGGGTKLTVLGSRGGGGSGGGGSGGGGSLEMAQVQLVESGGGLVQPGGSLR | Signal peptide-GPC3- |
| | LSCAASGFTFSSYAMSWVRQAPGKGLEWVSVIYSGGSSTYYADSVKGRFTISRDNSK | 37 scFv-myc tag- |
| | NTLYLQMNSLRAEDTAVYYCARTSYLNHGDYWGQGTLVTVSSEQKLISEEDLAAAT | linker- CD28T-CD30 |
| | GIEVMYPPPYLDNEKSNGTIIHVKGKHLCPSPLFPGPSKPFWVLVVVGGVLACYSLLV | IC |
| | TVAFIIFWVHRRACRKRIRQKLHLCYPVQTSQPKLELVDSRPRRSSTQLRSGASVTEPV | |
| | AEERGLMSQPLMETCHSVGAAYLESLPLQDASPAGGPSSPRDLPEPRVSTEHTNNKIE | |
| | KIYIMKADTVIVGTVKAELPEGRGLAGPAEPELEEELEADHTPHYPEQETEPPLGSCSD | |
| | VMLSVEEEGKEDPLPTAASGK | |
| 23 | METDTLLLWVLLLWVPGSTGQSVLTQPPSVSAAPGQRVTISCSGTRSNIGSDYVSWY | αGPC3-CD28T-41BB- |
| | QHLPGTAPKLLVYGDNLRPSGIPDRFSASKSGTSATLGITGLQTGDEADYYCGTWDYT | CSR |
| | LNGVVFGGGTKLTVLGSRGGGGSGGGGSGGGGSLEMAQVQLVESGGGLVQPGGSLR | Signal peptide-GPC3- |
| | LSCAASGFTFSSYAMSWVRQAPGKGLEWVSVIYSGGSSTYYADSVKGRFTISRDNSK | 37 scFv-myc tag- |
| | NTLYLQMNSLRAEDTAVYYCARTSYLNHGDYWGQGTLVTVSSEQKLISEEDLAAAT | linker- CD28T-41BB |
| | GIEVMYPPPYLDNEKSNGTIIHVKGKHLCPSPLFPGPSKPFWVLVVVGGVLACYSLLV | IC |
| | TVAFIIFWVKRGRKKLLYIFKQPFMRPVQTTQEEDGCSCRFPEEEEGGCEL | |
| 24 | METDTLLLWVLLLWVPGSTGQSVLTQPPSVSAAPGQRVTISCSGTRSNIGSDYVSWY | αGPC3-CD28T-OX40- |
| | QHLPGTAPKLLVYGDNLRPSGIPDRFSASKSGTSATLGITGLQTGDEADYYCGTWDYT | CSR |
| | LNGVVFGGGTKLTVLGSRGGGGSGGGGSGGGGSLEMAQVQLVESGGGLVQPGGSLR | Signal peptide-GPC3- |
| | LSCAASGFTFSSYAMSWVRQAPGKGLEWVSVIYSGGSSTYYADSVKGRFTISRDNSK | 37 scFv-myc tag- |
| | NTLYLQMNSLRAEDTAVYYCARTSYLNHGDYWGQGTLVTVSSEQKLISEEDLAAAT | linker- CD28T-OX40 |
| | GIEVMYPPPYLDNEKSNGTIIHVKGKHLCPSPLFPGPSKPFWVLVVVGGVLACYSLLV | IC |
| | TVAFIIFWVALYLLRRDQRLPPDAHKPPGGGSFRTPIQEEQADAHSTLAKI | |
| 25 | METDTLLLWVLLLWVPGSTGQSVLTQPPSVSAAPGQRVTISCSGTRSNIGSDYVSWY | αGPC3-CD28T-CD27- |
| | QHLPGTAPKLLVYGDNLRPSGIPDRFSASKSGTSATLGITGLQTGDEADYYCGTWDYT | CSR |
| | LNGVVFGGGTKLTVLGSRGGGGSGGGGSGGGGSLEMAQVQLVESGGGLVQPGGSLR | Signal peptide-GPC3- |
| | LSCAASGFTFSSYAMSWVRQAPGKGLEWVSVIYSGGSSTYYADSVKGRFTISRDNSK | 37 scFv-myc tag- |
| | NTLYLQMNSLRAEDTAVYYCARTSYLNHGDYWGQGTLVTVSSEQKLISEEDLAAAT | linker- CD28T-CD27 |
| | GIEVMYPPPYLDNEKSNGTIIHVKGKHLCPSPLFPGPSKPFWVLVVVGGVLACYSLLV | IC |
| | TVAFIIFWVQRRKYRSNKGESPVEPAEPCRYSCPREEEGSTIPIQEDYRKPEPACSP | |
| 26 | METDTLLLWVLLLWVPGSTGQSVLTQPPSVSAAPGQRVTISCSGTRSNIGSDYVSWY | αGPC3-41BBT-CD30- |
| | QHLPGTAPKLLVYGDNLRPSGIPDRFSASKSGTSATLGITGLQTGDEADYYCGTWDYT | CSR |
| | LNGVVFGGGTKLTVLGSRGGGGSGGGGSGGGGSLEMAQVQLVESGGGLVQPGGSLR | Signal peptide-GPC3- |
| | LSCAASGFTFSSYAMSWVRQAPGKGLEWVSVIYSGGSSTYYADSVKGRFTISRDNSK | 37 scFv-myc tag- |
| | NTLYLQMNSLRAEDTAVYYCARTSYLNHGDYWGQGTLVTVSSEQKLISEEDLAAAT | linker- 41BBT-CD30 |
| | GPADLSPGASSVTPPAPAREPGHSPQIISFFLALTSTALLFLLFFLTLRFSVVHRRACRKR | IC |
| | IRQKLHLCYPVQTSQPKLELVDSRPRRSSTQLRSGASVTEPVAEERGLMSQPLMETCH | |
| | SVGAAYLESLPLQDASPAGGPSSPRDLPEPRVSTEHTNNKIEKIYIMKADTVIVGTVKA | |
| | ELPEGRGLAGPAEPELEEELEADHTPHYPEQETEPPLGSCSDVMLSVEEEGKEDPLPTA | |
| | ASGK | |
| 27 | METDTLLLWVLLLWVPGSTGQSVLTQPPSVSAAPGQRVTISCSGTRSNIGSDYVSWY | αGPC3-41BBT-CD28- |
| | QHLPGTAPKLLVYGDNLRPSGIPDRFSASKSGTSATLGITGLQTGDEADYYCGTWDYT | CSR |
| | LNGVVFGGGTKLTVLGSRGGGGSGGGGSGGGGSLEMAQVQLVESGGGLVQPGGSLR | Signal peptide-GPC3- |
| | LSCAASGFTFSSYAMSWVRQAPGKGLEWVSVIYSGGSSTYYADSVKGRFTISRDNSK | 37 scFv-myc tag- |
| | NTLYLQMNSLRAEDTAVYYCARTSYLNHGDYWGQGTLVTVSSEQKLISEEDLAAAT | linker- 41BBT-CD28 |
| | GPADLSPGASSVTPPAPAREPGHSPQIISFFLALTSTALLFLLFFLTLRFSVVRSKRSRLL | IC |
| | HSDYMNMTPRRPGPTRKHYQPYAPPRDFAAYRS | |
| 28 | METDTLLLWVLLLWVPGSTGQSVLTQPPSVSAAPGQRVTISCSGTRSNIGSDYVSWY | αGPC3-41BBT-OX40- |
| | QHLPGTAPKLLVYGDNLRPSGIPDRFSASKSGTSATLGITGLQTGDEADYYCGTWDYT | CSR |
| | LNGVVFGGGTKLTVLGSRGGGGSGGGGSGGGGSLEMAQVQLVESGGGLVQPGGSLR | Signal peptide-GPC3- |
| | LSCAASGFTFSSYAMSWVRQAPGKGLEWVSVIYSGGSSTYYADSVKGRFTISRDNSK | 37 scFv-myc tag- |
| | NTLYLQMNSLRAEDTAVYYCARTSYLNHGDYWGQGTLVTVSSEQKLISEEDLAAAT | linker- 41BBT-OX40 |
| | GPADLSPGASSVTPPAPAREPGHSPQIISFFLALTSTALLFLLFFLTLRFSVVALYLLRRD | IC |
| | QRLPPDAHKPPGGGSFRTPIQEEQADAHSTLAKI | |
| 29 | METDTLLLWVLLLWVPGSTGQSVLTQPPSVSAAPGQRVTISCSGTRSNIGSDYVSWY | αGPC3-41BBT-CD27- |
| | QHLPGTAPKLLVYGDNLRPSGIPDRFSASKSGTSATLGITGLQTGDEADYYCGTWDYT | CSR |
| | LNGVVFGGGTKLTVLGSRGGGGSGGGGSGGGGSLEMAQVQLVESGGGLVQPGGSLR | Signal peptide-GPC3- |
| | LSCAASGFTFSSYAMSWVRQAPGKGLEWVSVIYSGGSSTYYADSVKGRFTISRDNSK | 37 scFv-myc tag- |
| | NTLYLQMNSLRAEDTAVYYCARTSYLNHGDYWGQGTLVTVSSEQKLISEEDLAAAT | linker- 41BBT-CD27 |
| | GPADLSPGASSVTPPAPAREPGHSPQIISFFLALTSTALLFLLFFLTLRFSVVQRRKYRSN | IC |
| | KGESPVEPAEPCRYSCPREEEGSTIPIQEDYRKPEPACSP | |
| 30 | METDTLLLWVLLLWVPGSTGQSVLTQPPSVSAAPGQRVTISCSGTRSNIGSDYVSWY | αGPC3-OX40T-CD30- |
| | QHLPGTAPKLLVYGDNLRPSGIPDRFSASKSGTSATLGITGLQTGDEADYYCGTWDYT | CSR |
| | LNGVVFGGGTKLTVLGSRGGGGSGGGGSGGGGSLEMAQVQLVESGGGLVQPGGSLR | Signal peptide-GPC3- |
| | LSCAASGFTFSSYAMSWVRQAPGKGLEWVSVIYSGGSSTYYADSVKGRFTISRDNSK | 37 scFv-myc tag- |
| | NTLYLQMNSLRAEDTAVYYCARTSYLNHGDYWGQGTLVTVSSEQKLISEEDLAAAT | linker- OX40T-CD30 |
| | GDRDPPATQPQETQGPPARPITVQPTEAWPRTSQGPSTRPVEVPGGRAVAAILGLGLV | IC |
| | LGLLGPLAILLHRRACRKRIRQKLHLCYPVQTSQPKLELVDSRPRRSSTQLRSGASVTE | |
| | PVAEERGLMSQPLMETCHSVGAAYLESLPLQDASPAGGPSSPRDLPEPRVSTEHTNNK | |
| | IEKIYEVIKADTVIVGTVKAELPEGRGLAGPAEPELEEELEADHTPHYPEQETEPPLGSCS | |
| | DVMLSVEEEGKEDPLPTAASGK | |
| 31 | METDTLLLWVLLLWVPGSTGQSVLTQPPSVSAAPGQRVTISCSGTRSNIGSDYVSWY | αGPC3- OX40T- |
| | QHLPGTAPKLLVYGDNLRPSGIPDRFSASKSGTSATLGITGLQTGDEADYYCGTWDYT | CD28-CSR |
| | LNGVVFGGGTKLTVLGSRGGGGSGGGGSGGGGSLEMAQVQLVESGGGLVQPGGSLR | Signal peptide-GPC3- |
| | LSCAASGFTFSSYAMSWVRQAPGKGLEWVSVIYSGGSSTYYADSVKGRFTISRDNSK | 37 scFv-myc tag- |
| | NTLYLQMNSLRAEDTAVYYCARTSYLNHGDYWGQGTLVTVSSEQKLISEEDLAAAT | linker- OX40T-CD28 |
| | GDRDPPATQPQETQGPPARPITVQPTEAWPRTSQGPSTRPVEVPGGRAVAAILGLGLV | IC |
| | LGLLGPLAILLRSKRSRLLHSDYMNMTPRRPGPTRKHYQPYAPPRDFAAYRS | |
| 32 | METDTLLLWVLLLWVPGSTGQSVLTQPPSVSAAPGQRVTISCSGTRSNIGSDYVSWY | αGPC3-OX40T-41BB- |
| | QHLPGTAPKLLVYGDNLRPSGIPDRFSASKSGTSATLGITGLQTGDEADYYCGTWDYT | CSR |
| | LNGVVFGGGTKLTVLGSRGGGGSGGGGSGGGGSLEMAQVQLVESGGGLVQPGGSLR | Signal peptide-GPC3- |
| | LNGVVFGGGTKLTVLGSRGGGGSGGGGSGGGGSLEMAQVQLVESGGGLVQPGGSLR | 37 scFv-myc tag- |
| | LSCAASGFTFSSYAMSWVRQAPGKGLEWVSVIYSGGSSTYYADSVKGRFTISRDNSK | linker- OX40T-41BB |
| | NTLYLQMNSLRAEDTAVYYCARTSYLNHGDYWGQGTLVTVSSEQKLISEEDLAAAT | IC |
| | GDRDPPATQPQETQGPPARPITVQPTEAWPRTSQGPSTRPVEVPGGRAVAAILGLGLV | |
| | LGLLGPLAILLKRGRKKLLYIFKQPFMRPVQTTQEEDGCSCRFPEEEEGGCEL | |
| 33 | METDTLLLWVLLLWVPGSTGQSVLTQPPSVSAAPGQRVTISCSGTRSNIGSDYVSWY | αGPC3- OX40T- |
| | QHLPGTAPKLLVYGDNLRPSGIPDRFSASKSGTSATLGITGLQTGDEADYYCGTWDYT | CD27-CSR |
| | LNGVVFGGGTKLTVLGSRGGGGSGGGGSGGGGSLEMAQVQLVESGGGLVQPGGSLR | Signal peptide-GPC3- |
| | LSCAASGFTFSSYAMSWVRQAPGKGLEWVSVIYSGGSSTYYADSVKGRFTISRDNSK | 37 scFv-myc tag- |
| | NTLYLQMNSLRAEDTAVYYCARTSYLNHGDYWGQGTLVTVSSEQKLISEEDLAAAT | linker- OX40T-CD27 |
| | GDRDPPATQPQETQGPPARPITVQPTEAWPRTSQGPSTRPVEVPGGRAVAAILGLGLV | IC |
| | LGLLGPLAILLQRRKYRSNKGESPVEPAEPCRYSCPREEEGSTIPIQEDYRKPEPACSP | |
| 34 | METDTLLLWVLLLWVPGSTGQSVLTQPPSVSAAPGQRVTISCSGTRSNIGSDYVSWY | αGPC3-CD27T-CD30- |
| | QHLPGTAPKLLVYGDNLRPSGIPDRFSASKSGTSATLGITGLQTGDEADYYCGTWDYT | CSR |
| | LNGVVFGGGTKLTVLGSRGGGGSGGGGSGGGGSLEMAQVQLVESGGGLVQPGGSLR | Signal peptide-GPC3- |
| | LSCAASGFTFSSYAMSWVRQAPGKGLEWVSVIYSGGSSTYYADSVKGRFTISRDNSK | 37 scFv-myc tag- |
| | NTLYLQMNSLRAEDTAVYYCARTSYLNHGDYWGQGTLVTVSSEQKLISEEDLAAAT | linker-CD27T-CD30 |
| | GPTHLPYVSEMLEARTAGHMQTLADFRQLPARTLSTHWPPQRSLCSSDFIRILVIFSGM | IC |
| | FLVFTLAGALFLHHRRACRKRIRQKLHLCYPVQTSQPKLELVDSRPRRSSTQLRSGAS | |
| | VTEPVAEERGLMSQPLMETCHSVGAAYLESLPLQDASPAGGPSSPRDLPEPRVSTEHT | |
| | NNKIEKIYEVIKADTVIVGTVKAELPEGRGLAGPAEPELEEELEADHTPHYPEQETEPPL | |
| | GSCSDVMLSVEEEGKEDPLPTAASGK | |
| 35 | METDTLLLWVLLLWVPGSTGQSVLTQPPSVSAAPGQRVTISCSGTRSNIGSDYVSWY | αGPC3- CD27T- |
| | QHLPGTAPKLLVYGDNLRPSGIPDRFSASKSGTSATLGITGLQTGDEADYYCGTWDYT | CD28-CSR |
| | LNGVVFGGGTKLTVLGSRGGGGSGGGGSGGGGSLEMAQVQLVESGGGLVQPGGSLR | Signal peptide-GPC3- |
| | LSCAASGFTFSSYAMSWVRQAPGKGLEWVSVIYSGGSSTYYADSVKGRFTISRDNSK | 37 scFv-myc tag- |
| | NTLYLQMNSLRAEDTAVYYCARTSYLNHGDYWGQGTLVTVSSEQKLISEEDLAAAT | linker- CD27T-CD28 |
| | GPTHLPYVSEMLEARTAGHMQTLADFRQLPARTLSTHWPPQRSLCSSDFIRILVIFSGM | IC |
| | FLVFTLAGALFLHRSKRSRLLHSDYMNMTPRRPGPTRKHYQPYAPPRDFAAYRS | |
| 36 | METDTLLLWVLLLWVPGSTGQSVLTQPPSVSAAPGQRVTISCSGTRSNIGSDYVSWY | αGPC3- CD27T- |
| | QHLPGTAPKLLVYGDNLRPSGIPDRFSASKSGTSATLGITGLQTGDEADYYCGTWDYT | 41BB-CSR |
| | LNGVVFGGGTKLTVLGSRGGGGSGGGGSGGGGSLEMAQVQLVESGGGLVQPGGSLR | Signal peptide-GPC3- |
| | LSCAASGFTFSSYAMSWVRQAPGKGLEWVSVIYSGGSSTYYADSVKGRFTISRDNSK | 37 scFv-myc tag- |
| | NTLYLQMNSLRAEDTAVYYCARTSYLNHGDYWGQGTLVTVSSEQKLISEEDLAAAT | linker- CD27T-41BB |
| | GPTHLPYVSEMLEARTAGHMQTLADFRQLPARTLSTHWPPQRSLCSSDFIRILVIFSGM | IC |
| | FLVFTLAGALFLHKRGRKKLLYIFKQPFMRPVQTTQEEDGCSCRFPEEEEGGCEL | |
| 37 | METDTLLLWVLLLWVPGSTGQSVLTQPPSVSAAPGQRVTISCSGTRSNIGSDYVSWY | αGPC3- CD27T- |
| | QHLPGTAPKLLVYGDNLRPSGIPDRFSASKSGTSATLGITGLQTGDEADYYCGTWDYT | OX40-CSR |
| | LNGVVFGGGTKLTVLGSRGGGGSGGGGSGGGGSLEMAQVQLVESGGGLVQPGGSLR | Signal peptide-GPC3- |
| | LSCAASGFTFSSYAMSWVRQAPGKGLEWVSVIYSGGSSTYYADSVKGRFTISRDNSK | 37 scFv-myc tag- |
| | NTLYLQMNSLRAEDTAVYYCARTSYLNHGDYWGQGTLVTVSSEQKLISEEDLAAAT | linker- CD27T-OX40 |
| | GPTHLPYVSEMLEARTAGHMQTLADFRQLPARTLSTHWPPQRSLCSSDFIRILVIFSGM | IC |
| | FLVFTLAGALFLHALYLLRRDQRLPPDAHKPPGGGSFRTPIQEEQADAHSTLAKI | |
| 38 | METDTLLLWVLLLWVPGSTGQSVLTQPPSVSAAPGQRVTISCSGTRSNIGSDYVSWY | αGPC3-CD8T-CD30- |
| | QHLPGTAPKLLVYGDNLRPSGIPDRFSASKSGTSATLGITGLQTGDEADYYCGTWDYT | CSR |
| | LNGVVFGGGTKLTVLGSRGGGGSGGGGSGGGGSLEMAQVQLVESGGGLVQPGGSLR | Signal peptide-GPC3- |
| | LSCAASGFTFSSYAMSWVRQAPGKGLEWVSVIYSGGSSTYYADSVKGRFTISRDNSK | 37 scFv-myc tag- |
| | NTLYLQMNSLRAEDTAVYYCARTSYLNHGDYWGQGTLVTVSSEQKLISEEDLAAAT | linker-CD8T-CD30 IC |
| | GTTTPAPRPPTPAPTIASQPLSLRPEACRPAAGGAVHTRGLDFACDIYIWAPLAGTCGV | |
| | LLLSLVITLYCHRRACRKRIRQKLHLCYPVQTSQPKLELVDSRPRRSSTQLRSGASVTE | |
| | PVAEERGLMSQPLMETCHSVGAAYLESLPLQDASPAGGPSSPRDLPEPRVSTEHTNNK | |
| | IEKIYIMKADTVIVGTVKAELPEGRGLAGPAEPELEEELEADHTPHYPEQETEPPLGSCS | |
| | DVMLSVEEEGKEDPLPTAASGK | |
| 39 | METDTLLLWVLLLWVPGSTGQSVLTQPPSVSAAPGQRVTISCSGTRSNIGSDYVSWY | αGPC3-CD8T-CD28- |
| | QHLPGTAPKLLVYGDNLRPSGIPDRFSASKSGTSATLGITGLQTGDEADYYCGTWDYT | CSR |
| | LNGVVFGGGTKLTVLGSRGGGGSGGGGSGGGGSLEMAQVQLVESGGGLVQPGGSLR | Signal peptide-GPC3- |
| | LSCAASGFTFSSYAMSWVRQAPGKGLEWVSVIYSGGSSTYYADSVKGRFTISRDNSK | 37 scFv-myc tag- |
| | NTLYLQMNSLRAEDTAVYYCARTSYLNHGDYWGQGTLVTVSSEQKLISEEDLAAAT | linker- CD8T-CD28 |
| | GTTTPAPRPPTPAPTIASQPLSLRPEACRPAAGGAVHTRGLDFACDIYIWAPLAGTCGV | IC |
| | LLLSLVITLYCRSKRSRLLHSDYMNMTPRRPGPTRKHYQPYAPPRDFAAYRS | |
| 40 | METDTLLLWVLLLWVPGSTGQSVLTQPPSVSAAPGQRVTISCSGTRSNIGSDYVSWY | αGPC3-CD8T-41BB- |
| | QHLPGTAPKLLVYGDNLRPSGIPDRFSASKSGTSATLGITGLQTGDEADYYCGTWDYT | CSR |
| | LNGVVFGGGTKLTVLGSRGGGGSGGGGSGGGGSLEMAQVQLVESGGGLVQPGGSLR | Signal peptide-GPC3- |
| | LSCAASGFTFSSYAMSWVRQAPGKGLEWVSVIYSGGSSTYYADSVKGRFTISRDNSK | 37 scFv-myc tag- |
| | NTLYLQMNSLRAEDTAVYYCARTSYLNHGDYWGQGTLVTVSSEQKLISEEDLAAAT | linker- CD8T-41BB |
| | GTTTPAPRPPTPAPTIASQPLSLRPEACRPAAGGAVHTRGLDFACDIYIWAPLAGTCGV | IC |
| | LLLSLVITLYCKRGRKKLLYIFKQPFMRPVQTTQEEDGCSCRFPEEEEGGCEL | |
| 41 | METDTLLLWVLLLWVPGSTGQSVLTQPPSVSAAPGQRVTISCSGTRSNIGSDYVSWY | αGPC3-CD8T-OX40- |
| | QHLPGTAPKLLVYGDNLRPSGIPDRFSASKSGTSATLGITGLQTGDEADYYCGTWDYT | CSR |
| | LNGVVFGGGTKLTVLGSRGGGGSGGGGSGGGGSLEMAQVQLVESGGGLVQPGGSLR | Signal peptide-GPC3- |
| | LSCAASGFTFSSYAMSWVRQAPGKGLEWVSVIYSGGSSTYYADSVKGRFTISRDNSK | 37 scFv-myc tag- |
| | NTLYLQMNSLRAEDTAVYYCARTSYLNHGDYWGQGTLVTVSSEQKLISEEDLAAAT | linker- CD8T-OX40 |
| | GTTTPAPRPPTPAPTIASQPLSLRPEACRPAAGGAVHTRGLDFACDIYIWAPLAGTCGV | IC |
| | LLLSLVITLYCALYLLRRDQRLPPDAHKPPGGGSFRTPIQEEQADAHSTLAKI | |
| 42 | METDTLLLWVLLLWVPGSTGQSVLTQPPSVSAAPGQRVTISCSGTRSNIGSDYVSWY | αGPC3-CD8T-CD27- |
| | QHLPGTAPKLLVYGDNLRPSGIPDRFSASKSGTSATLGITGLQTGDEADYYCGTWDYT | CSR |
| | LNGVVFGGGTKLTVLGSRGGGGSGGGGSGGGGSLEMAQVQLVESGGGLVQPGGSLR | Signal peptide-GPC3- |
| | LSCAASGFTFSSYAMSWVRQAPGKGLEWVSVIYSGGSSTYYADSVKGRFTISRDNSK | 37 scFv-myc tag- |
| | NTLYLQMNSLRAEDTAVYYCARTSYLNHGDYWGQGTLVTVSSEQKLISEEDLAAAT | linker- CD8T-CD27 |
| | GTTTPAPRPPTPAPTIASQPLSLRPEACRPAAGGAVHTRGLDFACDIYIWAPLAGTCGV | IC |
| | LLLSLVITLYCQRRKYRSNKGESPVEPAEPCRYSCPREEEGSTIPIQEDYRKPEPACSP | |
| 43 | QPVLTQPPSVSVAPGKTARITCGGNNIGSKSVHWYQQKPGQAPVLVIYYDSDRPSGIP | αGPC3-55_scFv |
| | ERFSGSNSGNTATLTISRVEAGDEADYYCQVWDSSSDHYVFGTGTKVTVLGSRGGGG | (αGPC3 scFv_clone |
| | SGGGGSGGGGSLEMAQVQLVQSGAEVKKPGASVKVSCKASGYTFTSYYMHWVRQA | 55) |
| | PGQGLEWMGIINPSGGSTSYAQKFQGRVTMTRDTSTSTVYMELSSLRSEDTAVYYCA | |
| | RWHGGPYDYWGQGTLVTVSS | |
| 44 | QSVLTQPPSVSVAPGKTARITCGGNNIGSKSVHWYQQKPGQAPVLVVYDDSDRPSGIP | αGPC3-58 scFv |
| | ERFSGSNSGNTATLTISRVEAGDEADYYCQVWDSSSDHVFGTGTKVTVLGSRGGGGS | (αGPC3 scFv_clone |
| | GGGGSGGGGSLEMAQVQLVQSGADVRKPGASVKVSCKASGYTFASHGISWVRQAPG | 58) |
| | QGLEWLGWISPYTGNTNYAQKFQGRVTMATDTSTSTAYMELRSLRSDDTAIYYCAR | |
| | GKRTLASCFDYWGQGTLVTVSS | |
| 45 | LPVLTQPPSVSVAPGKTARITCGGNNIGSKSVHWYQQKPGQAPVLVVYDDSDRPSGIP | αCD19 scFv |
| | ERFSGSNSGNTATLTISRVEAGDEADYYCQVWDSSSDYVVFGGGTKLTVLGSRGGGG | |
| | SGGGGSGGGGSLEMAEVQLVQSGAEVKKPGESLKISCKGSGYSFTSYWIGWVRQMP | |
| | GKGLEWMGIIYPGDSDTRYSPSFQGQVTISADKSISTAYLQWSSLKASDTAMYYCAR | |
| | QVWGWQGGMYPRSNWWYNLDSWGQGTLVTVSS | |
| 46 | QIVLSQSPAILSASPGEKVTMTCRASSSVSYIHWFQQKPGSSPKPWIYATSNLASGVPV | αCD20 scFv |
| | RFSGSGSGTSYSLTISRVEAEDAATYYCQQWTSNPPTFGGGTKLEIKRSRGGGGSGGG | |
| | GSGGGGSLEQVQLQQPGAELVKPGASVKMSCKASGYTFTSYNMHWVKQTPGRGLE | |
| | WIGAIYPGNGDTSYNQKFKGKATLTADKSSSTAYMQLSSLTSEDSAVYYCARSTYYG | |
| | GDWYFNVWGAGTTVTVSS | |
| 47 | DIQLTQSPSSLSTSVGDRVTITCQASHDIRNYLNVVYQQKPGKAPNLLIYAASNLQTGV | αCD22-8 scFv |
| | PSRFSGRGSGTDFTLTISSLQPEDIATYYCQQYDGLPLTFGQGTRLEIKRSRGGGGSGG | |
| | GGSGGGGSLEMAQVQLVESGGGLVQPGGSLRLSCAASGFTFSNYAMSWVRQAPGKG | |
| | LEWVSSISGSGGSTYYADSVKGRFTISRDTSKNTLYLQMNSLRAEDTAVYYCARYGS | |
| | AAWMDSWGQGTLVTVSS | |
| 48 | DIQLTQSPSSLSTSVGDRVTITCQASHDIRNYLNWYQQKPGKAPNLLIYAASNLQTGV | αCD22-αCD19 |
| | PSRFSGRGSGTDFTLTISSLQPEDIATYYCQQYDGLPLTFGQGTRLEIKRSRGGGGSGG | anti-CD22-clone 8 |
| | GGSGGGGSLEMAQVQLVESGGGLVQPGGSLRLSCAASGFTFSNYAMSWVRQAPGKG | scFv and anti-CD19 |
| | LEWVSSISGSGGSTYYADSVKGRFTISRDTSKNTLYLQMNSLRAEDTAVYYCARYGS | scFv - linker -anti- |
| | AAWMDSWGQGTLVTVSSGGGGSGGGGSLPVLTQPPSVSVAPGKTARITCGGNNIGSK | CD19 scFv |
| | SVHWYQQKPGQAPVLVVYDDSDRPSGIPERFSGSNSGNTATLTISRVEAGDEADYYC | |
| | QVWDSSSDYVVFGGGTKLTVLGSRGGGGSGGGGSGGGGSLEMAEVQLVQSGAEVK | |
| | KPGESLKISCKGSGYSFTSYWIGWVRQMPGKGLEWMGIIYPGDSDTRYSPSFQGQVTI | |
| | SADKSISTAYLQWSSLKASDTAMYYCARQVWGWQGGMYPRSNWWYNLDSWGQGT | |
| | LVTVSS | |
| 49 | LPVLTQPPSVSVAPGKTARITCGGNNIGSKSVHWYQQKPGQAPVLVVYDDSDRPSGIP | αCD19-αCD22-αCD20 |
| | ERFSGSNSGNTATLTISRVEAGDEADYYCQVWDSSSDYVVFGGGTKLTVLGSRGGGG | CD19 scFv-linker- |
| | SGGGGSGGGGSLEMAEVQLVQSGAEVKKPGESLKISCKGSGYSFTSYWIGWVRQMP | CD22 scFv-linker- |
| | GKGLEWMGIIYPGDSDTRYSPSFQGQVTISADKSISTAYLQWSSLKASDTAMYYCAR | CD20 scFv |
| | QVWGWQGGMYPRSNWWYNLDSWGQGTLVTVSSGGGGSGGGGSDIQLTQSPSSLST | |
| | SVGDRVTITCQASHDIRNYLNWYQQKPGKAPNLLIYAASNLQTGVPSRFSGRGSGTDF | |
| | TLTISSLQPEDIATYYCQQYDGLPLTFGQGTRLEIKRSRGGGGSGGGGSGGGGSLEMA | |
| | QVQLVESGGGLVQPGGSLRLSCAASGFTFSNYAMSWVRQAPGKGLEWVSSISGSGGS | |
| | TYYADSVKGRFTISRDTSKNTLYLQMNSLRAEDTAVYYCARYGSAAWMDSWGQGT | |
| | LVTVSSGGGGSGGGGSQIVLSQSPAILSASPGEKVTMTCRASSSVSYIHWFQQKPGSSP | |
| | KPWIYATSNLASGVPVRFSGSGSGTSYSLTISRVEAEDAATYYCQQWTSNPPTFGGGT | |
| | KLEIKRSRGGGGSGGGGSGGGGSLEQVQLQQPGAELVKPGASVKMSCKASGYTFTSY | |
| | NMHWVKQTPGRGLEWIGAIYPGNGDTSYNQKFKGKATLTADKSSSTAYMQLSSLTS | |
| | EDSAVYYCARSTYYGGDWYFNVWGAGTTVTVSS | |
| 50 | EIVLTQSPGTLSLSPGERATLSCRASQSVSSSYLAWYQQKPGQAPRLLIYGASSRATGIP | ROR1-18 scFv |
| | DRFSGSGSGTDFTLTISRLEPEDFAVYYCQQYGSSFGPGTKVDIKRSRGGGGSGGGGS | |
| | GGGGSLEMAQVQLVQSGTEVKKPGSSVKVSCQASGGSLSSHGVSWLRQAPGQGLEW | |
| | VGRIIPMFGVTDYAQKFQDRVTITADKSTSTVYMELISLGSDDTAVYFCARESRGATF | |
| | EYWGQGTLVTVSS | |
| 51 | QSVLTQPASVSGSPGQSITISCTGTSSDFGDYDYVSWYQQHPGKAPKLMIYDVSDRPS | ROR1-56 scFv |
| | GVSNRFSGSKSGNTASLTISGLQAEDEADYFCSSLTTSSTLVFGGGTKLTVLGSRGGG | |
| | GSGGGGSGGGGSLEMAQLQLQESGPGLVKPSETLSLTCTVSGGSISSSSYYWGWIRQP | |
| | PGKGLEWIGSIYYSGSTYYNPSLKSRVTISVDTSKNQFSLKLGSVTAADTAVYYCARH | |
| | DGTDAFDIWGQGTTVTVSS | |
| 52 | QSVLTQPPSVSGAPGQRVTISCTGSSSNIGAGYDVHWYQQLPGTAPKLLIYGNSNRPS | PSMA-A scFv |
| | GVPDRFSGSKSGTSASLAITGLQAEDEADYYCQSYDSSLSGYVFGTGTKVTVLGSRGG | |
| | GGSGGGGSGGGGSLEMAEVQLVQSGAEVKKPGESLKISCKGSGYSFTSYWIGWVRQ | |
| | MPGKGLEWMGIIYPGDSDTRYSPSFQGQVTISADKSISTAYLQWSSLKASDTAMYYC | |
| | ARSMGSSLYASSDVWGQGTLVTVSS | |
| 53 | QAVLTQPPSASGTPGQRVTISCSGSSSNIGSNTVNWYQQLPGTAPKLLMYSNNQRPSG | PSMA-B scFv |
| | VPDRFSGSKSGTSASLAISGLQSEDEADYYCAAWDDSLNGYVFGTGTKVTVLGSRGG | |
| | GGSGGGGSGGGGSLEMAEVQLVQSGAEMKKPGESLKISCKGSGYNFASYWVGWVR | |
| | QMPGKGLEWMGTIYPDDSDTRYGPAFQGQVTISADKSISTAYLQWSSLKASDTAMY | |
| | YCARDSYYGIDVWGQGTLVTVSS | |
| 54 | DILLTQSPVILSVSPGERVSFSCRASQSIGTNIHWYQQRTNGSPRLLIKYASESISGIPSRF | EGFR scFv |
| | SGSGSGTDFTLSINSVESEDIADYYCQQNNNWPTTFGAGTKLELKRSRGGGGSGGGGS | |
| | GGGGSLEMAQVQLKQSGPGLVQPSQSLSITCTVSGFSLTNYGVHWVRQSPGKGLEWL | |
| | GVIWSGGNTDYNTPFTSRLSINKDNSKSQVFFKMNSLQSNDTAIYYCARALTYYDYEF | |
| | AYWGQGTLVTVSS | |
| 55 | APPLGTQPDCNPTPENGEAPASTSPTQSLLVDSQASKTLPIPTSAPVALSSTGKPVLDA | CD30TM + IC |
| | GPVLFWVILVLVVVVGSSAFLLCHRRACRKRIRQKLHLCYPVQTSQPKLELVDSRPRR | |
| | SSTQLRSGASVTEPVAEERGLMSQPLMETCHSVGAAYLESLPLQDASPAGGPSSPRDL | |
| | PEPRVSTEHTNNKIEKIYIMKADTVIVGTVKAELPEGRGLAGPAEPELEEELEADHTPH | |
| | YPEQETEPPLGSCSDVMLSVEEEGKEDPLPTAASGK | |
| 56 | IEVMYPPPYLDNEKSNGTIIHVKGKHLCPSPLFPGPSKPFWVLVVVGGVLACYSLLVT | CD28TM + IC |
| | VAFIIFWVRSKRSRLLHSDYMNMTPRRPGPTRKHYQPYAPPRDFAAYRS | |
| 57 | PADLSPGASSVTPPAPAREPGHSPQIISFFLALTSTALLFLLFFLTLRFSVVKRGRKKLLY | 41BB TM + IC |
| | IFKQPFMRPVQTTQEEDGCSCRFPEEEEGGCEL | |
| 58 | DRDPPATQPQETQGPPARPITVQPTEAWPRTSQGPSTRPVEVPGGRAVAAILGLGLVL | OX40 TM + IC |
| | GLLGPLAILLALYLLRRDQRLPPDAHKPPGGGSFRTPIQEEQADAHSTLAKI | |
| 59 | PTHLPYVSEMLEARTAGHMQTLADFRQLPARTLSTHWPPQRSLCSSDFIRILVIFSGMF | CD27TM + IC |
| | LVFTLAGALFLHQRRKYRSNKGESPVEPAEPCRYSCPREEEGSTIPIQEDYRKPEPACSP | |
| 60 | IEVMYPPPYLDNEKSNGTIIHVKGKHLCPSPLFPGPSKPFWVLVVVGGVLACYSLLVT | CD28T-CD30 IC |
| | VAFIIFWVHRRACRKRIRQKLHLCYPVQTSQPKLELVDSRPRRSSTQLRSGASVTEPVA | |
| | EERGLMSQPLMETCHSVGAAYLESLPLQDASPAGGPSSPRDLPEPRVSTEHTNNKIEKI | |
| | YIMKADTVIVGTVKAELPEGRGLAGPAEPELEEELEADHTPHYPEQETEPPLGSCSDV | |
| | MLSVEEEGKEDPLPTAASGK | |
| 61 | PADLSPGASSVTPPAPAREPGHSPQIISFFLALTSTALLFLLFFLTLRFSVVHRRACRKRI | 41BBT-CD30 IC |
| | RQKLHLCYPVQTSQPKLELVDSRPRRSSTQLRSGASVTEPVAEERGLMSQPLMETCHS | |
| | VGAAYLESLPLQDASPAGGPSSPRDLPEPRVSTEHTNNKIEKIYIMKADTVIVGTVKAE | |
| | LPEGRGLAGPAEPELEEELEADHTPHYPEQETEPPLGSCSDVMLSVEEEGKEDPLPTAA | |
| | SGK | |
| 62 | DRDPPATQPQETQGPPARPITVQPTEAWPRTSQGPSTRPVEVPGGRAVAAILGLGLVL | OX40T-CD30 IC |
| | GLLGPLAILLHRRACRKRIRQKLHLCYPVQTSQPKLELVDSRPRRSSTQLRSGASVTEP | |
| | VAEERGLMSQPLMETCHSVGAAYLESLPLQDASPAGGPSSPRDLPEPRVSTEHTNNKI | |
| | EKIYIMKADTVIVGTVKAELPEGRGLAGPAEPELEEELEADHTPHYPEQETEPPLGSCS | |
| | DVMLSVEEEGKEDPLPTAASGK | |
| 63 | PTHLPYVSEMLEARTAGHMQTLADFRQLPARTLSTHWPPQRSLCSSDFIRILVIFSGMF | CD27T-CD30 IC |
| | LVFTLAGALFLHHRRACRKRIRQKLHLCYPVQTSQPKLELVDSRPRRSSTQLRSGASV | |
| | TEPVAEERGLMSQPLMETCHSVGAAYLESLPLQDASPAGGPSSPRDLPEPRVSTEHTN | |
| | NKIEKIYIMKADTVIVGTVKAELPEGRGLAGPAEPELEEELEADHTPHYPEQETEPPLG | |
| | SCSDVMLSVEEEGKEDPLPTAASGK | |
| 64 | TTTPAPRPPTPAPTIASQPLSLRPEACRPAAGGAVHTRGLDFACDIYIWAPLAGTCGVL | CD8T-CD30 IC |
| | LLSLVITLYCHRRACRKRIRQKLHLCYPVQTSQPKLELVDSRPRRSSTQLRSGASVTEP | |
| | VAEERGLMSQPLMETCHSVGAAYLESLPLQDASPAGGPSSPRDLPEPRVSTEHTNNKI | |
| | EKIYIMKADTVIVGTVKAELPEGRGLAGPAEPELEEELEADHTPHYPEQETEPPLGSCS | |
| | DVMLSVEEEGKEDPLPTAASGK | |
| 65 | MRVLLAALGLLFLGALRAFPQDRPFEDTCHGNPSHYYDKAVRRCCYRCPMGLFPTQ | Full length CD30 |
| | QCPQRPTDCRKQCEPDYYLDEADRCTACVTCSRDDLVEKTPCAWNSSRVCECRPGM | (NP_001234.3) |
| | FCSTSAVNSCARCFFHSVCPAGMIVKFPGTAQKNTVCEPASPGVSPACASPENCKEPSS | |
| | GTIPQAKPTPVSPATSSASTMPVRGGTRLAQEAASKLTRAPDSPSSVGRPSSDPGLSPT | |
| | QPCPEGSGDCRKQCEPDYYLDEAGRCTACVSCSRDDLVEKTPCAWNSSRTCECRPGM | |
| | ICATSATNSCARCVPYPICAAETVTKPQDMAEKDTTFEAPPLGTQPDCNPTPENGEAP | |
| | ASTSPTQSLLVDSQASKTLPIPTSAPVALSSTGKPVLDAGPVLFWVILVLVVVVGSSAF | |
| | LLCHRRACRKRIRQKLHLCYPVQTSQPKLELVDSRPRRSSTQLRSGASVTEPVAEERG | |
| | LMSQPLMETCHSVGAAYLESLPLQDASPAGGPSSPRDLPEPRVSTEHTNNKIEKIYIMK | |
| | ADTVIVGTVKAELPEGRGLAGPAEPELEEELEADHTPHYPEQETEPPLGSCSDVMLSV | |
| | EEEGKEDPLPTAASGK | |
| 66 | IYIWAPLAGTCGVLLLSLVIT | CD8 transmembrane |
| | | (TM) sequence |
| 67 | IISFFLALTSTALLFLLFFLTLRFSVV | 4-1BB TMsequence |
| 68 | ILVIFSGMFLVFTLAGALFLH | CD27 TM sequence |
| 69 | FWVLVVVGGVLACYSLLVTVAFIIFWV | CD28 TM sequence |
| 70 | PVLDAGPVLFWVILVLVVVVGSSAFLLC | CD30 TM sequence |
| 71 | VAAILGLGLVLGLLGPLAILL | OX40 TM sequence |
| 72 | KRGRKKLLYIFKQPFMRPVQTTQEEDGCSCRFPEEEEGGCEL | 4-1BB IC signaling |
| | | sequence |
| 73 | QRRKYRSNKGESPVEPAEPCRYSCPREEEGSTIPIQEDYRKPEPACSP | CD27 IC signaling |
| | | sequence |
| 74 | RSKRSRLLHSDYMNMTPRRPGPTRKHYQPYAPPRDFAAYRS | CD28 IC signaling |
| | | sequence |
| 75 | HRRACRKRIRQKLHLCYPVQTSQPKLELVDSRPRRSSTQLRSGASVTEPVAEERGLMS | CD30 IC signaling |
| | QPLMETCHSVGAAYLESLPLQDASPAGGPSSPRDLPEPRVSTEHTNNKIEKIYIMKADT | sequence |
| | VIVGTVKAELPEGRGLAGPAEPELEEELEADHTPHYPEQETEPPLGSCSDVMLSVEEE | |
| | GKEDPLPTAASGK | |
| 76 | ALYLLRRDQRLPPDAHKPPGGGSFRTPIQEEQADAHSTLAKI | OX40 IC signaling |
| | | sequence |
| 77 | RVKFSRSADAPAYQQGQNQLYNELNLGRREEYDVLDKRRGRDPEMGGKPRRKNPQE | CD3ζ IC signaling |
| | GLYNELQKDKMAEAYSEIGMKGERRRGKGHDGLYQGLSTATKDTYDALHMQALPP | sequence |
| | R | |
| 78 | SRGGGGSGGGGSGGGGSLEMA | Peptide linker |
| 79 | GGGGS | Peptide linker |
| 80 | GGSG | Peptide linker |
| 81 | SGGG | Peptide linker |
| 82 | GSGS | Peptide linker |
| 83 | GSGSGS | Peptide linker |
| 84 | GSGSGSGS | Peptide linker |
| 85 | GSGSGSGSGS | Peptide linker |
| 86 | GGSGGS | Peptide linker |
| 87 | GGSGGSGGS | Peptide linker |
| 88 | GGSGGSGGSGGS | Peptide linker |
| 89 | GGSG | Peptide linker |
| 90 | GGSGGGSG | Peptide linker |
| 91 | GGSGGGSGGGSG | Peptide linker |
| 92 | SRGGGGSGGGGSGGGGSLEMA | Peptide linker |
| 93 | HHHHHH | 6xHis Tag |
| 94 | YPYDVPDYA | HA peptide |
| 95 | YPYDVPDYAS | HA peptide |
| 96 | DYKDDDDK | FLAG peptide |
| 97 | EQKLISEEDL | Myc peptide |
| 98 | EVQLVESGGGLVQPGGSLRLSCAASGFTFSNYAMSWVRQAPGKGLEWVSAISGSGGS | Anti-CD22 V_{H} region |
| | TYYADSVKGRFTISRDNSKNTLYLQMNSLRAEDTAVYYCARPYYDDWGQGTLVTVS | |
| | S | |
| 99 | QSVVTQPPSVSAAPGQKVTISCSGSSSNIGNNYVSWYQQLPGTAPKLLIYENNKRPSGI | Anti-CD22 V_{L} region |
| | PDRFSGSKSGTSATLGITGLQTGDEADYYCGTWDSSLSAGAVFGGGTKLTVLG | |
| 100 | QVQLVESGGGLVQPGGSLRLSCAASGFTFSNYAMSWVRQAPGKGLEWVSSISGSGGS | Anti-CD22 V_{H} region |
| | TYYADSVKGRFTISRDTSKNTLYLQMNSLRAEDTAVYYCARYGSAAWMDSWGQGT | |
| | LVTVSS | |
| 101 | DIQLTQSPSSLSTSVGDRVTITCQASHDIRNYLNWYQQKPGKAPNLLIYAASNLQTGV | Anti-CD22 V_{L} region |
| | PSRFSGRGSGTDFTLTISSLQPEDIATYYCQQYDGLPLTFGQGTRLEIKR | |
| 102 | EVQLVQSGAEVKKPGESLKISCKGSGYSFTSYWIGWVRQMPGKGLEWMGIIYPGDSD | Anti-CD19 V_{H} region |
| | TRYSPSFQGQVTISADKSISTAYLQWSSLKASDTAMYYCARQVWGWQGGMYPRSNW | |
| | WYNLDSWGQGTLVTVSS | |
| 103 | LPVLTQPPSVSVAPGKTARITCGGNNIGSKSVHWYQQKPGQAPVLVVYDDSDRPSGIP | Anti-CD19 V_{L} region |
| | ERFSGSNSGNTATLTISRVEAGDEADYYCQVWDSSSDYVVFGGGTKLTVLG | |
| 104 | QVQLQQPGAELVKPGASVKMSCKASGYTFTSYNMHWVKQTPGRGLEWIGAIYPGNG | Anti-CD20 V_{H} region |
| | DTSYNQKFKGKATLTADKSSSTAYMQLSSLTSEDSAVYYCARSTYYGGDWYFNVWG | |
| | AGTTVTVSS | |
| 105 | QIVLSQSPAILSASPGEKVTMTCRASSSVSYIHWFQQKPGSSPKPWIYATSNLASGVPV | Anti-CD20 V_{L} region |
| | RFSGSGSGTSYSLTISRVEAEDAATYYCQQWTSNPPTFGGGTKLEIKR | |
| 106 | QVQLQESGPGLVKPSQTLSLTCTVSGYTFTNYYVFWVRQARGQRLEWIGDINPVNGD | Anti-CD47 V_{H} region |
| | TNFNEKFKNRVTISADKSISTAYLQWSSLKASDTAMYYCARGGYTMDYWGQGTLVT | |
| | VS | |
| 107 | DIVMTQTPLSLPVTPGEPASISCRSSQSLVHSNGNTYLHWYQQKPGKAPKLLIYKVSY | Anti-CD47 V_{L} region |
| | RFSGVPDRFSGSGSGTDFTLKISRVEAEDVGVYYCSQNTHVPRTFGQGTKVEIKR | |
| 108 | QVQLVQSGAEVKKPGASVKVSCKASGYTFTSYYMHWVRQAPGQGLEWMGIINPSGG | Anti-GPC3 V_{H} region |
| | STSYAQKFQGRVTMTRDTSTSTVYMELSSLRSEDTAVYYCARWHGGPYDYWGQGTL | |
| | VTVSS | |
| 109 | QPVLTQPPSVSVAPGKTARITCGGNNIGSKSVHWYQQKPGQAPVLVIYYDSDRPSGIP | Anti-GPC3 V_{L} region |
| | ERFSGSNSGNTATLTISRVEAGDEADYYCQVWDSSSDHYVFGTGTKVTVLG | |
| 110 | QVQLVQSGADVRKPGASVKVSCKASGYTFASHGISWVRQAPGQGLEWLGWISPYTG | Anti-GPC3 V_{H} region |
| | NTNYAQKFQGRVTMATDTSTSTAYMELRSLRSDDTAIYYCARGKRTLASCFDYWGQ | |
| | GTLVTVSS | |
| 111 | QSVLTQPPSVSVAPGKTARITCGGNNIGSKSVHWYQQKPGQAPVLVVYDDSDRPSGIP | Anti-GPC3 V_{L} region |
| | ERFSGSNSGNTATLTISRVEAGDEADYYCQVWDSSSDHVFGTGTKVTVLG | |
| 112 | GGAGGAAAAACTGTTTCATACAGAAGGCGTGGAGGAAAAACTGTTTCATACAGA | 6NFAT response |
| | AGGCGTGGAGGAAAAACTGTTTCATACAGAAGGCGTGGAGGAAAAACTGTTTCAT | element |
| | ACAGAAGGCGTGGAGGAAAAACTGTTTCATACAGAAGGCGTGGAGGAAAAACTG | |
| | TTTCATACAGAAGGCGT | |
| 113 | GCCGCCCCGACTGCATCTGCGTGTTCCAATTCGCCAATGACAAGACGCTGGGCGG | TA promoter |
| | GGTTTGTGTCATCATAGAACTAAAGACATGCAAATATATTTCTTCCGGGGACACC | |
| | GCCAGCAAACGCGAGCAACGGGCCACGGGGATGAAGCAG | |
| 114 | GGAGGAAAAACTGTTTCATACAGAAGGCGTGGAGGAAAAACTGTTTCATACAGA | NFAT-derived |
| | AGGCGTGGAGGAAAAACTGTTTCATACAGAAGGCGTGGAGGAAAAACTGTTTCAT | promoter |
| | ACAGAAGGCGTGGAGGAAAAACTGTTTCATACAGAAGGCGTGGAGGAAAAACTG | |
| | TTTCATACAGAAGGCGTCTCGAGGCCGCCCCGACTGCATCTGCGTGTTCCAATTCG | |
| | CCAATGACAAGACGCTGGGCGGGGTTTGTGTCATCATAGAACTAAAGACATGCAA | |
| | ATATATTTCTTCCGGGGACACCGCCAGCAAACGCGAGCAACGGGCCACGGGGATG | |
| | AAGCAG | |
| 115 | QPVLTQPPSASGTPGQRVTISCSGSSSNIGSNNVIWYQQLPGAAPKLLIYSNHRRPSGVP | anti-GPC3 scFv_clone |
| | DRFSGSRSGTSASLAISGLQSEDEADYYCAAWDDSLDGYLFGTGTKVTVLGSRGGGG | 34 |
| | SGGGGSGGGGSLEMAQVQLQQWGAGLLKPSETLSLTCAVYGGSFSGYYWSWIRQPP | |
| | GKGLEWIGEINHSGSTNYNPSLKSRVTISVDTSKNQFSLELSSVTAADTAVYYCARGY | |
| | GGRFDYWGQGTLVTVSS | |
| 116 | QSVLTQPPSVSAAPGQRVTISCSGTRSNIGSDYVSWYQHLPGTAPKLLVYGDNLRPSGI | anti-GPC3 scFv_clone |
| | PDRFSASKSGTSATLGITGLQTGDEADYYCGTWDYTLNGVVFGGGTKLTVLGSRGGG | 37 |
| | GSGGGGSGGGGSLEMAQVQLVESGGGLVQPGGSLRLSCAASGFTFSSYAMSWVRQA | |
| | PGKGLEWVSVIYSGGSSTYYADSVKGRFTISRDNSKNTLYLQMNSLRAEDTAVYYCA | |
| | RTSYLNHGDYWGQGTLVTVSS | |
| 117 | QSVLTQPPSVSGTPGQRVIISCPGSTSNIGTNTVNWYQQFPGTAPKLLIYSNNQRPSGVP | anti-GPC3 scFv_clone |
| | DRFSGSKSGTSASLAISGLQSEDEADYYCAAWDDSLNGVVFGGGTKLTVLGSRGGGG | 45 |
| | SGGGGSGGGGSLEMAQMQLVQSGGGLVKPGGSLRLSCAASGFTFSDYYMSWIRQAP | |
| | GKGLEWVSYISSSGSTIYYADSVKGRFTISRDNAKNSLYLQMNSLRAEDTAVYYCAR | |
| | ASDLYGDWGQGTLVTVSS | |
| 118 | QAVLTQPPSVSTPGQRVTISCSGSSSNFGSNTVHWYQQVPGTAPKLLIFSNTQRPSEIPD | anti-GPC3 scFv_clone |
| | RFSGSKSGTSASLAISGLQSEDEADYYCAAWDDSLTGVVFGGGTKLTVLGSRGGGGS | 46 |
| | GGGGSGGGGSLEMAQVQLVQSGAEVKKPGASVTVSCKASGYRFSNYGVSWVRQAP | |
| | GQGLEWMGWISGSNGNTNYAQKFLGRVTMTTDTSTTTAYMELSSLRSDDTAVYYCA | |
| | RGNRRYYSPIIDPWGQGTLVTVSS | |
| 119 | DVVMTQSPLSLPVTPGEPASVSCRSSQSLLHSNGYNYLDWYLQKPGQSPQLLIYLGSN | anti-GPC3 scFv_clone |
| | RASGVPDRFSGSGSGTDFTLKISRVEAEDVGVYYCMQALQTPWTFGQGTKVEIKRSR | 87 |
| | GGGGSGGGGSGGGGSLEMAEVQLVQSGAEVRKPGSSVKVSCQASGGTFGSYAISWV | |
| | RQAPGQGLEWMGRIIPVLGRTKYAQKFQGRVTVTADTSTSTVYMELTSLTSEDTAVY | |
| | YCARTNDSWGQGTLVTVSS | |
| 120 | QVQLQQWGAGLLKPSETLSLTCAVYGGSFSGYYWSWIRQPPGKGLEWIGEINHSGST | anti-GPC3 V_{H}_clone |
| | NYNPSLKSRVTISVDTSKNQFSLELSSVTAADTAVYYCARGYGGRFDYWGQGTLVTV | 34 |
| | SS | |
| 121 | QPVLTQPPSASGTPGQRVTISCSGSSSNIGSNNVIWYQQLPGAAPKLLIYSNHRRPSGVP | anti-GPC3 V_{L}_clone |
| | DRFSGSRSGTSASLAISGLQSEDEADYYCAAWDDSLDGYLFGTGTKVTVLG | 34 |
| 122 | QVQLVESGGGLVQPGGSLRLSCAASGFTFSSYAMSWVRQAPGKGLEWVSVIYSGGSS | anti-GPC3 V_{H}_clone |
| | TYYADSVKGRFTISRDNSKNTLYLQMNSLRAEDTAVYYCARTSYLNHGDYWGQGTL | 37 |
| | VTVSS | |
| 123 | QSVLTQPPSVSAAPGQRVTISCSGTRSNIGSDYVSWYQHLPGTAPKLLVYGDNLRPSGI | anti-GPC3 V_{L}_clone |
| | PDRFSASKSGTSATLGITGLQTGDEADYYCGTWDYTLNGVVFGGGTKLTVLG | 37 |
| 124 | QMQLVQSGGGLVKPGGSLRLSCAASGFTFSDYYMSWIRQAPGKGLEWVSYISSSGSTI | anti-GPC3 V_{H}_clone |
| | YYADSVKGRFTISRDNAKNSLYLQMNSLRAEDTAVYYCARASDLYGDWGQGTLVT | 45 |
| | VSS | |
| 125 | QSVLTQPPSVSGTPGQRVIISCPGSTSNIGTNTVNWYQQFPGTAPKLLIYSNNQRPSGVP | anti-GPC3 V_{L}_clone |
| | DRFSGSKSGTSASLAISGLQSEDEADYYCAAWDDSLNGVVFGGGTKLTVLG | 45 |
| 126 | QVQLVQSGAEVKKPGASVTVSCKASGYRFSNYGVSWVRQAPGQGLEWMGWISGSN | anti-GPC3 V_{H}_clone |
| | GNTNYAQKFLGRVTMTTDTSTTTAYMELSSLRSDDTAVYYCARGNRRYYSPIIDPWG | 46 |
| | QGTLVTVSS | |
| 127 | QAVLTQPPSVSGTPGQRVTISCSGSSSNFGSNTVHWYQQVPGTAPKLLIFSNTQRPSEIP | anti-GPC3 V_{L}_clone |
| | DRFSGSKSGTSASLAISGLQSEDEADYYCAAWDDSLTGVVFGGGTKLTVLG | 46 |
| 128 | QVQLVQSGAEVKKPGASVKVSCKASGYTFTSYYMHWVRQAPGQGLEWMGIINPSGG | anti-GPC3 V_{H}_clone |
| | STSYAQKFQGRVTMTRDTSTSTVYMELSSLRSEDTAVYYCARWHGGPYDYWGQGTL | 55 |
| | VTVSS | |
| 129 | QPVLTQPPSVSVAPGKTARITCGGNNIGSKSVHWYQQKPGQAPVLVIYYDSDRPSGIP | anti-GPC3 V_{L}_clone |
| | ERFSGSNSGNTATLTISRVEAGDEADYYCQVWDSSSDHYVFGTGTKVTVLG | 55 |
| 130 | QVQLVQSGADVRKPGASVKVSCKASGYTFASHGISWVRQAPGQGLEWLGWISPYTG | anti-GPC3 V_{H}_clone |
| | NTNYAQKFQGRVTMATDTSTSTAYMELRSLRSDDTAIYYCARGKRTLASCFDYWGQ | 58 |
| | GTLVTVSS | |
| 131 | QSVLTQPPSVSVAPGKTARITCGGNNIGSKSVHWYQQKPGQAPVLVVYDDSDRPSGIP | anti-GPC3 V_{L}_clone |
| | ERFSGSNSGNTATLTISRVEAGDEADYYCQVWDSSSDHVFGTGTKVTVLG | 58 |
| 132 | EVQLVQSGAEVRKPGSSVKVSCQASGGTFGSYAISWVRQAPGQGLEWMGRIIPVLGR | anti-GPC3 V_{H}_clone |
| | TKYAQKFQGRVTVTADTSTSTVYMELTSLTSEDTAVYYCARTNDSWGQGTLVTVSS | 87 |
| 133 | DVVMTQSPLSLPVTPGEPASVSCRSSQSLLHSNGYNYLDWYLQKPGQSPQLLIYLGSN | anti-GPC3 V_{L}_clone |
| | RASGVPDRFSGSGSGTDFTLKISRVEAEDVGVYYCMQALQTPWTFGQGTKVEIKR | 87 |
| 134 | METDTLLLWVLLLWVPGSTGQPVLTQPPSASGTPGQRVTISCSGSSSNIGSNNVIWYQ | anti-GPC3-CD8T-Z- |
| | QLPGAAPKLLIYSNHRRPSGVPDRFSGSRSGTSASLAISGLQSEDEADYYCAAWDDSL | CAR with signal |
| | DGYLFGTGTKVTVLGSRGGGGSGGGGSGGGGSLEMAQVQLQQWGAGLLKPSETLSL | peptide (SP) and myc |
| | TCAVYGGSFSGYYWSWIRQPPGKGLEWIGEINHSGSTNYNPSLKSRVTISVDTSKNQF | tag_clone 34 |
| | SLELSSVTAADTAVYYCARGYGGRFDYWGQGTLVTVSSEQKLISEEDLAAATGTTTP | |
| | APRPPTPAPTIASQPLSLRPEACRPAAGGAVHTRGLDFACDIYIWAPLAGTCGVLLLSL | |
| | VITLYCRVKFSRSADAPAYQQGQNQLYNELNLGRREEYDVLDKRRGRDPEMGGKPR | |
| | RKNPQEGLYNELQKDKMAEAYSEIGMKGERRRGKGHDGLYQGLSTATKDTYDALH | |
| | MQALPPR | |
| 135 | METDTLLLWVLLLWVPGSTGQSVLTQPPSVSAAPGQRVTISCSGTRSNIGSDYVSWY | anti-GPC3-CD8T-Z- |
| | QHLPGTAPKLLVYGDNLRPSGIPDRFSASKSGTSATLGITGLQTGDEADYYCGTWDYT | CAR with SP and myc |
| | LNGVVFGGGTKLTVLGSRGGGGSGGGGSGGGGSLEMAQVQLVESGGGLVQPGGSLR | tag_clone 37 |
| | LSCAASGFTFSSYAMSWVRQAPGKGLEWVSVIYSGGSSTYYADSVKGRFTISRDNSK | |
| | NTLYLQMNSLRAEDTAVYYCARTSYLNHGDYWGQGTLVTVSSEQKLISEEDLAAAT | |
| | GTTTPAPRPPTPAPTIASQPLSLRPEACRPAAGGAVHTRGLDFACDIYIWAPLAGTCGV | |
| | LLLSLVITLYCRVKFSRSADAPAYQQGQNQLYNELNLGRREEYDVLDKRRGRDPEMG | |
| | GKPRRKNPQEGLYNELQKDKMAEAYSEIGMKGERRRGKGHDGLYQGLSTATKDTY | |
| | DALHMQALPPR | |
| 136 | METDTLLLWVLLLWVPGSTGQSVLTQPPSVSGTPGQRVIISCPGSTSNIGTNTVNWYQ | anti-GPC3-CD8T-Z- |
| | QFPGTAPKLLIYSNNQRPSGVPDRFSGSKSGTSASLAISGLQSEDEADYYCAAWDDSL | CAR with SP and myc |
| | NGVVFGGGTKLTVLGSRGGGGSGGGGSGGGGSLEMAQMQLVQSGGGLVKPGGSLR | tag_clone 45 |
| | LSCAASGFTFSDYYMSWIRQAPGKGLEWVSYISSSGSTIYYADSVKGRFTISRDNAKN | |
| | SLYLQMNSLRAEDTAVYYCARASDLYGDWGQGTLVTVSSEQKLISEEDLAAATGTTT | |
| | PAPRPPTPAPTIASQPLSLRPEACRPAAGGAVHTRGLDFACDIYIWAPLAGTCGVLLLS | |
| | LVITLYCRVKFSRSADAPAYQQGQNQLYNELNLGRREEYDVLDKRRGRDPEMGGKP | |
| | RRKNPQEGLYNELQKDKMAEAYSEIGMKGERRRGKGHDGLYQGLSTATKDTYDAL | |
| | HMQALPPR | |
| 137 | METDTLLLWVLLLWVPGSTGQAVLTQPPSVSTPGQRVTISCSGSSSNFGSNTVHWYQ | anti-GPC3-CD8T-Z- |
| | QVPGTAPKLLIFSNTQRPSEIPDRFSGSKSGTSASLAISGLQSEDEADYYCAAWDDSLT | CAR with SP and myc |
| | GVVFGGGTKLTVLGSRGGGGSGGGGSGGGGSLEMAQVQLVQSGAEVKKPGASVTV | tag_clone 46 |
| | SCKASGYRFSNYGVSWVRQAPGQGLEWMGWISGSNGNTNYAQKFLGRVTMTTDTS | |
| | TTTAYMELSSLRSDDTAVYYCARGNRRYYSPIIDPWGQGTLVTVSSEQKLISEEDLAA | |
| | ATGTTTPAPRPPTPAPTIASQPLSLRPEACRPAAGGAVHTRGLDFACDIYIWAPLAGTC | |
| | GVLLLSLVITLYCRVKFSRSADAPAYQQGQNQLYNELNLGRREEYDVLDKRRGRDPE | |
| | MGGKPRRKNPQEGLYNELQKDKMAEAYSEIGIMKGERRRGKGHDGLYQGLSTATKD | |
| | TYDALHMQALPPR | |
| 138 | METDTLLLWVLLLWVPGSTGQPVLTQPPSVSVAPGKTARITCGGNNIGSKSVHWYQQ | anti-GPC3-CD8T-Z |
| | KPGQAPVLVIYYDSDRPSGIPERFSGSNSGNTATLTISRVEAGDEADYYCQVWDSSSD | CAR with SP and myc |
| | HYVFGTGTKVTVLGSRGGGGSGGGGSGGGGSLEMAQVQLVQSGAEVKKPGASVKV | tag_clone 55 |
| | SCKASGYTFTSYYMHWVRQAPGQGLEWMGIINPSGGSTSYAQKFQGRVTMTRDTST | |
| | STVYMELSSLRSEDTAVYYCARWHGGPYDYWGQGTLVTVSSEQKLISEEDLAAATG | |
| | TTTPAPRPPTPAPTIASQPLSLRPEACRPAAGGAVHTRGLDFACDIYIWAPLAGTCGVL | |
| | LLSLVITLYCRVKFSRSADAPAYQQGQNQLYNELNLGRREEYDVLDKRRGRDPEMG | |
| | GKPRRKNPQEGLYNELQKDKMAEAYSEIGMKGERRRGKGHDGLYQGLSTATKDTY | |
| | DALHMQALPPR | |
| 139 | METDTLLLWVLLLWVPGSTGQSVLTQPPSVSVAPGKTARITCGGNNIGSKSVHWYQQ | anti-GPC3-CD8T-Z- |
| | KPGQAPVLVVYDDSDRPSGIPERFSGSNSGNTATLTISRVEAGDEADYYCQVWDSSSD | CAR with SP and myc |
| | HVFGTGTKVTVLGSRGGGGSGGGGSGGGGSLEMAQVQLVQSGADVRKPGASVKVS | tag_clone 58 |
| | CKASGYTFASHGISWVRQAPGQGLEWLGWISPYTGNTNYAQKFQGRVTMATDTSTS | |
| | TAYMELRSLRSDDTAIYYCARGKRTLASCFDYWGQGTLVTVSSEQKLISEEDLAAAT | |
| | GTTTPAPRPPTPAPTIASQPLSLRPEACRPAAGGAVHTRGLDFACDIYIWAPLAGTCGV | |
| | LLLSLVITLYCRVKFSRSADAPAYQQGQNQLYNELNLGRREEYDVLDKRRGRDPEMG | |
| | GKPRRKNPQEGLYNELQKDKMAEAYSEIGMKGERRRGKGHDGLYQGLSTATKDTY | |
| | DALHMQALPPR | |
| 140 | METDTLLLWVLLLWVPGSTGDVVMTQSPLSLPVTPGEPASVSCRSSQSLLHSNGYNY | anti-GPC3-CD8T-Z- |
| | LDWYLQKPGQSPQLLIYLGSNRASGVPDRFSGSGSGTDFTLKISRVEAEDVGVYYCM | CAR with SP and myc |
| | QALQTPWTFGQGTKVEIKRSRGGGGSGGGGSGGGGSLEMAEVQLVQSGAEVRKPGS | tag_clone 87 |
| | SVKVSCQASGGTFGSYAISWVRQAPGQGLEWMGRIIPVLGRTKYAQKFQGRVTVTA | |
| | DTSTSTVYMELTSLTSEDTAVYYCARTNDSWGQGTLVTVSSEQKLISEEDLAAATGTT | |
| | TPAPRPPTPAPTIASQPLSLRPEACRPAAGGAVHTRGLDFACDIYIWAPLAGTCGVLLL | |
| | SLVITLYCRVKFSRSADAPAYQQGQNQLYNELNLGRREEYDVLDKRRGRDPEMGGK | |
| | PRRKNPQEGLYNELQKDKMAEAYSEIGMKGERRRGKGHDGLYQGLSTATKDTYDAL | |
| | HMQALPPR | |
| 141 | METDTLLLWVLLLWVPGSTGQPVLTQPPSASGTPGQRVTISCSGSSSNIGSNNVIWYQ | anti-GPC3-CD28z- |
| | QLPGAAPKLLIYSNHRRPSGVPDRFSGSRSGTSASLAISGLQSEDEADYYCAAWDDSL | CAR with SP and myc |
| | DGYLFGTGTKVTVLGSRGGGGSGGGGSGGGGSLEMAQVQLQQWGAGLLKPSETLSL | tag_clone 34 |
| | TCAVYGGSFSGYYWSWIRQPPGKGLEWIGEINHSGSTNYNPSLKSRVTISVDTSKNQF | |
| | SLELSSVTAADTAVYYCARGYGGRFDYWGQGTLVTVSSEQKLISEEDLAAAIEVMYP | |
| | PPYLDNEKSNGTIIHVKGKHLCPSPLFPGPSKPFWVLVVVGGVLACYSLLVTVAFIIFW | |
| | VRSKRSRLLHSDYMNMTPRRPGPTRKHYQPYAPPRDFAAYRSRVKFSRSADAPAYQQ | |
| | GQNQLYNELNLGRREEYDVLDKRRGRDPEMGGKPRRKNPQEGLYNELQKDKMAEA | |
| | YSEIGMKGERRRGKGHDGLYQGLSTATKDTYDALHMQALPPR | |
| 142 | METDTLLLWVLLLWVPGSTGQSVLTQPPSVSAAPGQRVTISCSGTRSNIGSDYVSWY | anti-GPC3-CD28z- |
| | QHLPGTAPKLLVYGDNLRPSGIPDRFSASKSGTSATLGITGLQTGDEADYYCGTWDYT | CAR with SP and myc |
| | LNGVVFGGGTKLTVLGSRGGGGSGGGGSGGGGSLEMAQVQLVESGGGLVQPGGSLR | tag_clone 37 |
| | LSCAASGFTFSSYAMSWVRQAPGKGLEWVSVIYSGGSSTYYADSVKGRFTISRDNSK | |
| | NTLYLQMNSLRAEDTAVYYCARTSYLNHGDYWGQGTLVTVSSEQKLISEEDLAAAIE | |
| | VMYPPPYLDNEKSNGTIIHVKGKHLCPSPLFPGPSKPFWVLVVVGGVLACYSLLVTVA | |
| | FIIFWVRSKRSRLLHSDYMNMTPRRPGPTRKHYQPYAPPRDFAAYRSRVKFSRSADAP | |
| | AYQQGQNQLYNELNLGRREEYDVLDKRRGRDPEMGGKPRRKNPQEGLYNELQKDK | |
| | [sequence omitted] | |
| 143 | METDTLLLWVLLLWVPGSTGQSVLTQPPSVSGTPGQRVIISCPGSTSNIGTNTVNWYQ | anti-GPC3-CD28z- |
| | QFPGTAPKLLIYSNNQRPSGVPDRFSGSKSGTSASLAISGLQSEDEADYYCAAWDDSL | CAR with SP and myc |
| | NGVVFGGGTKLTVLGSRGGGGSGGGGSGGGGSLEMAQMQLVQSGGGLVKPGGSLR | tag_clone 45 |
| | LSCAASGFTFSDYYMSWIRQAPGKGLEWVSYISSSGSTIYYADSVKGRFTISRDNAKN | |
| | SLYLQMNSLRAEDTAVYYCARASDLYGDWGQGTLVTVSSEQKLISEEDLAAAIEVM | |
| | YPPPYLDNEKSNGTIIHVKGKHLCPSPLFPGPSKPFWVLVVVGGVLACYSLLVTVAFII | |
| | FWVRSKRSRLLHSDYMNMTPRRPGPTRKHYQPYAPPRDFAAYRSRVKFSRSADAPA | |
| | YQQGQNQLYNELNLGRREEYDVLDKRRGRDPEMGGKPRRKNPQEGLYNELQKDKM | |
| | AEAYSEIG1[sequence omitted] | |
| 144 | METDTLLLWVLLLWVPGSTGQAVLTQPPSVSTPGQRVTISCSGSSSNFGSNTVHWYQ | anti-GPC3-CD28z- |
| | QVPGTAPKLLIFSNTQRPSEIPDRFSGSKSGTSASLAISGLQSEDEADYYCAAWDDSLT | CAR with SP and myc |
| | GVVFGGGTKLTVLGSRGGGGSGGGGSGGGGSLEMAQVQLVQSGAEVKKPGASVTV | tag_clone 46 |
| | SCKASGYRFSNYGVSWVRQAPGQGLEWMGWISGSNGNTNYAQKFLGRVTMTTDTS | |
| | TTTAYMELSSLRSDDTAVYYCARGNRRYYSPIIDPWGQGTLVTVSSEQKLISEEDLAA | |
| | AIEVMYPPPYLDNEKSNGTIIHVKGKHLCPSPLFPGPSKPFWVLVVVGGVLACYSLLV | |
| | TVAFIIFWVRSKRSRLLHSDYMNMTPRRPGPTRKHYQPYAPPRDFAAYRSRVKFSRSA | |
| | DAPAYQQGQNQLYNELNLGRREEYDVLDKRRGRDPEMGGKPRRKNPQEGLYNELQ | |
| | KDKMAEAYSEIGMKGERRRGKGHDGLYQGLSTATKDTYDALHMQALPPR | |
| 145 | METDTLLLWVLLLWVPGSTGQPVLTQPPSVSVAPGKTARITCGGNNIGSKSVHWYQQ | anti-GPC3-CD28z- |
| | KPGQAPVLVIYYDSDRPSGIPERFSGSNSGNTATLTISRVEAGDEADYYCQVWDSSSD | CAR with SP and myc |
| | HYVFGTGTKVTVLGSRGGGGSGGGGSGGGGSLEMAQVQLVQSGAEVKKPGASVKV | tag_clone 55 |
| | SCKASGYTFTSYYMHWVRQAPGQGLEWMGIINPSGGSTSYAQKFQGRVTMTRDTST | |
| | STVYMELSSLRSEDTAVYYCARWHGGPYDYWGQGTLVTVSSEQKLISEEDLAAAIEV | |
| | MYPPPYLDNEKSNGTIIHVKGKHLCPSPLFPGPSKPFWVLVVVGGVLACYSLLVTVAF | |
| | IIFWVRSKRSRLLHSDYMNMTPRRPGPTRKHYQPYAPPRDFAAYRSRVKFSRSADAPA | |
| | YQQGQNQLYNELNLGRREEYDVLDKRRGRDPEMGGKPRRKNPQEGLYNELQKDKM | |
| | AEAYSEIGMKGERRRGKGHDGLYQGLSTATKDTYDALHMQALPPR | |
| 146 | METDTLLLWVLLLWVPGSTGQSVLTQPPSVSVAPGKTARITCGGNNIGSKSVHWYQQ | anti-GPC3-CD28z- |
| | KPGQAPVLVVYDDSDRPSGIPERFSGSNSGNTATLTISRVEAGDEADYYCQVWDSSSD | CAR with SP and myc |
| | HVFGTGTKVTVLGSRGGGGSGGGGSGGGGSLEMAQVQLVQSGADVRKPGASVKVS | tag_clone 58 |
| | CKASGYTFASHGISWVRQAPGQGLEWLGWISPYTGNTNYAQKFQGRVTMATDTSTS | |
| | TAYMELRSLRSDDTAIYYCARGKRTLASCFDYWGQGTLVTVSSEQKLISEEDLAAAIE | |
| | VMYPPPYLDNEKSNGTIIHVKGKHLCPSPLFPGPSKPFWVLVVVGGVLACYSLLVTVA | |
| | FIIFWVRSKRSRLLHSDYMNMTPRRPGPTRKHYQPYAPPRDFAAYRSRVKFSRSADAP | |
| | AYQQGQNQLYNELNLGRREEYDVLDKRRGRDPEMGGKPRRKNPQEGLYNELQKDK | |
| | [sequence omitted] | |
| 147 | METDTLLLWVLLLWVPGSTGDVVMTQSPLSLPVTPGEPASVSCRSSQSLLHSNGYNY | anti-GPC3-CD28z- |
| | LDWYLQKPGQSPQLLIYLGSNRASGVPDRFSGSGSGTDFTLKISRVEAEDVGVYYCM | CAR with SP and myc |
| | QALQTPWTFGQGTKVEIKRSRGGGGSGGGGSGGGGSLEMAEVQLVQSGAEVRKPGS | tag_clone 87 |
| | SVKVSCQASGGTFGSYAISWVRQAPGQGLEWMGRIIPVLGRTKYAQKFQGRVTVTA | |
| | DTSTSTVYMELTSLTSEDTAVYYCARTNDSWGQGTLVTVSSEQKLISEEDLAAAIEVM | |
| | YPPPYLDNEKSNGTIIHVKGKHLCPSPLFPGPSKPFWVLVVVGGVLACYSLLVTVAFII | |
| | FWVRSKRSRLLHSDYMNMTPRRPGPTRKHYQPYAPPRDFAAYRSRVKFSRSADAPA | |
| | YQQGQNQLYNELNLGRREEYDVLDKRRGRDPEMGGKPRRKNPQEGLYNELQKDKM | |
| | AEAYSEIGMKGERRRGKGHDGLYQGLSTATKDTYDALHMQALPPR | |
| 148 | METDTLLLWVLLLWVPGSTGQPVLTQPPSASGTPGQRVTISCSGSSSNIGSNNVIWYQ | anti-GPC3-CD30-CSR |
| | QLPGAAPKLLIYSNHRRPSGVPDRFSGSRSGTSASLAISGLQSEDEADYYCAAWDDSL | with SP and myc |
| | DGYLFGTGTKVTVLGSRGGGGSGGGGSGGGGSLEMAQVQLQQWGAGLLKPSETLSL | tag_clone 34 |
| | TCAVYGGSFSGYYWSWIRQPPGKGLEWIGEINHSGSTNYNPSLKSRVTISVDTSKNQF | |
| | SLELSSVTAADTAVYYCARGYGGRFDYWGQGTLVTVSSEQKLISEEDLAAATGAPPL | |
| | GTQPDCNPTPENGEAPASTSPTQSLLVDSQASKTLPIPTSAPVALSSTGKPVLDAGPVL | |
| | FWVILVLVVVVGSSAFLLCHRRACRKRIRQKLHLCYPVQTSQPKLELVDSRPRRSSTQ | |
| | LRSGASVTEPVAEERGLMSQPLMETCHSVGAAYLESLPLQDASPAGGPSSPRDLPEPR | |
| | VSTEHTNNKIEKIYEVIKADTVIVGTVKAELPEGRGLAGPAEPELEEELEADHTPHYPEQ | |
| | ETEPPLGSCSDVMLSVEEEGKEDPLPTAASGK | |
| 149 | METDTLLLWVLLLWVPGSTGQSVLTQPPSVSGTPGQRVIISCPGSTSNIGTNTVNWYQ | anti-GPC3-CD30-CSR |
| | QFPGTAPKLLIYSNNQRPSGVPDRFSGSKSGTSASLAISGLQSEDEADYYCAAWDDSL | with SP and myc |
| | NGVVFGGGTKLTVLGSRGGGGSGGGGSGGGGSLEMAQMQLVQSGGGLVKPGGSLR | tag_clone 45 |
| | LSCAASGFTFSDYYMSWIRQAPGKGLEWVSYISSSGSTIYYADSVKGRFTISRDNAKN | |
| | SLYLQMNSLRAEDTAVYYCARASDLYGDWGQGTLVTVSSEQKLISEEDLAAATGAPP | |
| | LGTQPDCNPTPENGEAPASTSPTQSLLVDSQASKTLPIPTSAPVALSSTGKPVLDAGPV | |
| | LFWVILVLVVVVGSSAFLLCHRRACRKRIRQKLHLCYPVQTSQPKLELVDSRPRRSST | |
| | QLRSGASVTEPVAEERGLMSQPLMETCHSVGAAYLESLPLQDASPAGGPSSPRDLPEP | |
| | RVSTEHTNNKIEKIYIMKADTVIVGTVKAELPEGRGLAGPAEPELEEELEADHTPHYPE | |
| | QETEPPLGSCSDVMLSVEEEGKEDPLPTAASGK | |
| 150 | METDTLLLWVLLLWVPGSTGQAVLTQPPSVSTPGQRVTISCSGSSSNFGSNTVHWYQ | anti-GPC3-CD30-CSR |
| | QVPGTAPKLLIFSNTQRPSEIPDRFSGSKSGTSASLAISGLQSEDEADYYCAAWDDSLT | with SP and myc |
| | GVVFGGGTKLTVLGSRGGGGSGGGGSGGGGSLEMAQVQLVQSGAEVKKPGASVTV | tag_clone 46 |
| | SCKASGYRFSNYGVSWVRQAPGQGLEWMGWISGSNGNTNYAQKFLGRVTMTTDTS | |
| | TTTAYMELSSLRSDDTAVYYCARGNRRYYSPIIDPWGQGTLVTVSSEQKLISEEDLAA | |
| | ATGAPPLGTQPDCNPTPENGEAPASTSPTQSLLVDSQASKTLPIPTSAPVALSSTGKPVL | |
| | DAGPVLFWVILVLVVVVGSSAFLLCHRRACRKRIRQKLHLCYPVQTSQPKLELVDSRP | |
| | RRSSTQLRSGASVTEPVAEERGLMSQPLMETCHSVGAAYLESLPLQDASPAGGPSSPR | |
| | DLPEPRVSTEHTNNKIEKIYIMKADTVIVGTVKAELPEGRGLAGPAEPELEEELEADHT | |
| | PHYPEQETEPPLGSCSDVMLSVEEEGKEDPLPTAASGK | |
| 151 | METDTLLLWVLLLWVPGSTGQPVLTQPPSVSVAPGKTARITCGGNNIGSKSVHWYQQ | anti-GPC3-CD30-CSR |
| | KPGQAPVLVIYYDSDRPSGIPERFSGSNSGNTATLTISRVEAGDEADYYCQVWDSSSD | with SP and myc |
| | HYVFGTGTKVTVLGSRGGGGSGGGGSGGGGSLEMAQVQLVQSGAEVKKPGASVKV | tag_clone 55 |
| | SCKASGYTFTSYYMHWVRQAPGQGLEWMGIINPSGGSTSYAQKFQGRVTMTRDTST | |
| | STVYMELSSLRSEDTAVYYCARWHGGPYDYWGQGTLVTVSSEQKLISEEDLAAATG | |
| | APPLGTQPDCNPTPENGEAPASTSPTQSLLVDSQASKTLPIPTSAPVALSSTGKPVLDA | |
| | GPVLFWVILVLVVVVGSSAFLLCHRRACRKRIRQKLHLCYPVQTSQPKLELVDSRPRR | |
| | SSTQLRSGASVTEPVAEERGLMSQPLMETCHSVGAAYLESLPLQDASPAGGPSSPRDL | |
| | PEPRVSTEHTNNKIEKIYIMKADTVIVGTVKAELPEGRGLAGPAEPELEEELEADHTPH | |
| | YPEQETEPPLGSCSDVMLSVEEEGKEDPLPTAASGK | |
| 152 | METDTLLLWVLLLWVPGSTGQSVLTQPPSVSVAPGKTARITCGGNNIGSKSVHWYQQ | anti-GPC3-CD30-CSR |
| | KPGQAPVLVVYDDSDRPSGIPERFSGSNSGNTATLTISRVEAGDEADYYCQVWDSSSD | with SP and myc |
| | HVFGTGTKVTVLGSRGGGGSGGGGSGGGGSLEMAQVQLVQSGADVRKPGASVKVS | tag_clone 58 |
| | CKASGYTFASHGISWVRQAPGQGLEWLGWISPYTGNTNYAQKFQGRVTMATDTSTS | |
| | TAYMELRSLRSDDTAIYYCARGKRTLASCFDYWGQGTLVTVSSEQKLISEEDLAAAT | |
| | GAPPLGTQPDCNPTPENGEAPASTSPTQSLLVDSQASKTLPIPTSAPVALSSTGKPVLD | |
| | AGPVLFWVILVLVVVVGSSAFLLCHRRACRKRIRQKLHLCYPVQTSQPKLELVDSRPR | |
| | RSSTQLRSGASVTEPVAEERGLMSQPLMETCHSVGAAYLESLPLQDASPAGGPSSPRD | |
| | LPEPRVSTEHTNNKIEKIYIMKADTVIVGTVKAELPEGRGLAGPAEPELEEELEADHTP | |
| | HYPEQETEPPLGSCSDVMLSVEEEGKEDPLPTAASGK | |
| 153 | METDTLLLWVLLLWVPGSTGDVVMTQSPLSLPVTPGEPASVSCRSSQSLLHSNGYNY | anti-GPC3-CD30-CSR |
| | LDWYLQKPGQSPQLLIYLGSNRASGVPDRFSGSGSGTDFTLKISRVEAEDVGVYYCM | with SP and myc |
| | QALQTPWTFGQGTKVEIKRSRGGGGSGGGGSGGGGSLEMAEVQLVQSGAEVRKPGS | tag_clone 87 |
| | SVKVSCQASGGTFGSYAISWVRQAPGQGLEWMGRIIPVLGRTKYAQKFQGRVTVTA | |
| | DTSTSTVYMELTSLTSEDTAVYYCARTNDSWGQGTLVTVSSEQKLISEEDLAAATGA | |
| | PPLGTQPDCNPTPENGEAPASTSPTQSLLVDSQASKTLPIPTSAPVALSSTGKPVLDAGP | |
| | VLFWVILVLVVVVGSSAFLLCHRRACRKRIRQKLHLCYPVQTSQPKLELVDSRPRRSS | |
| | TQLRSGASVTEPVAEERGLMSQPLMETCHSVGAAYLESLPLQDASPAGGPSSPRDLPE | |
| | PRVSTEHTNNKIEKIYEVIKADTVIVGTVKAELPEGRGLAGPAEPELEEELEADHTPHYP | |
| | EQETEPPLGSCSDVMLSVEEEGKEDPLPTAASGK | |
| 154 | METDTLLLWVLLLWVPGSTG | Signal peptide |
| 155 | LLAGLVAADAVASLLIVGAVFLCARPRRSPAQEDGKVYINMPGRG | Dap10 TM + IC |
| 156 | CARPRRSPAQEDGKVYINMPGRG | Dap10 IC signaling |
| | | sequence |
| 157 | PLFQVPEPV | AFP peptide can be |
| | | targeted by CAR; |
| | | hAFP137-145 |
| 158 | FMNKFIYEI | AFP peptide can be |
| | | targeted by CAR; |
| | | hAFP158-166 |
| 159 | GLSPNLNRFL | AFP peptide can be |
| | | targeted by CAR; |
| | | hAFP325-334 |
| 160 | GVALQTMKQ | AFP peptide can be |
| | | targeted by CAR; |
| | | hAFP542-550 |
| 161 | AMNKFIYEI | AFP peptide can be |
| | | targeted by CAR; |
| | | hAFP158 A1 |
| 162 | FMAKFIYEI | AFP peptide can be |
| | | targeted by CAR; |
| | | hAFP158 A3 |
| 163 | FMNAFIYEI | AFP peptide can be |
| | | targeted by CAR; |
| | | hAFP158 A4 |
| 164 | FMNKAIYEI | AFP peptide can be |
| | | targeted by CAR; |
| | | hAFP158 A5 |
| 165 | FMNKFAYEI | AFP peptide can be |
| | | targeted by CAR; |
| | | hAFP158 A6 |
| 166 | FMNKFIAEI | hAFP158 A7 |
| | | AFP peptide can be |
| 167 | FMNKFIYAI | targeted by CAR; |
| | | hAFP158 A8 |
| 168 | GYTFTSYG | Anti-AFP_HCDR1 |
| 169 | ISAYNGNT | Anti-AFP_HCDR2 |
| 170 | ARDSYYYYYGMDV | Anti-AFP_HCDR3 |
| 171 | EVQLVQSGAEVKKPGASVKVSCKASGYTFTSYGISWVRQAPGQGLEWMGWISAYNG | anti-AFP V_{H} |
| | NTNYAQKLQGRVTMTTDTSTSTAYMELRSLRSDDTAVYYCARDSYYYYYGMDVWG | |
| | QGTTVTVSS | |
| 172 | TGAVTSGHY | Anti-AFP_LCDR1 |
| 173 | DAS | Anti-AFP_LCDR2 |
| 174 | LLSYSDALV | Anti-AFP_LCDR3 |
| 175 | QAVVTQEPSLTVSPGGTVTLTCGSSTGAVTSGHYPYWFQQKPGQAPRTLIYDASDKH | anti-AFP V_{L} |
| | SWTPARFSGSLLGGKAALTLSGAQPEDEAEYYCLLSYSDALVFGGGTKLTVLG | |
| 176 | GYSFPNYW | Anti-AFP_HCDR1 |
| 177 | IDPGDSYT | Anti-AFP_HCDR2 |
| 178 | ARYYVSLVDI | Anti-AFP_HCDR3 |
| 179 | EVQLVQSGAEVKKPGESLTISCKASGYSFPNYWITWVRQMSGGGLEWMGRIDPGDSY | anti-AFP V_{H} |
| | TTYNPSFQGHVTISIDKSTNTAYLHWNSLKASDTAMYYCARYYVSLVDIWGQGTLVT | |
| | VSS | |
| 180 | SSDVGGYNY | Anti-AFP_LCDR1 |
| 181 | DVN | Anti-AFP_LCDR2 |
| 182 | SSYTTGSRAV | Anti-AFP_LCDR3 |
| 183 | QSVLTQPASVSGSPGQSITISCTGTSSDVGGYNYVSWYQQHPGKAPKLMIYDVNNRPS | anti-AFP V_{L} |
| | EVSNRFSGSKSGNTASLTISGLQAEDEADYYCSSYTTGSRAVFGGGTKLTVLG | |
| 184 | GFTFSNAW | Anti-AFP_HCDR1 |
| 185 | IRSKAYGGTT | Anti-AFP_HCDR2 |
| 186 | ARDGLYSSSWYDSDY | Anti-AFP_HCDR3 |
| 187 | EVQLVESGGGLVKPGGSLRLSCAASGFTFSNAWMSWVRQAPGKGLEWVGFIRSKAY | anti-AFP V_{H} |
| | GGTTEYAASVKGRFTISRDDSKSIAYLQMNNLKTEDTAVYYCARDGLYSSSWYDSDY | |
| | WGQGTLVTVSS | |
| 188 | SSNIGNNY | Anti-AFP_LCDR1 |
| 189 | DNN | Anti-AFP_LCDR2 |
| 190 | GTWDGSLYTML | Anti-AFP_LCDR3 |
| 191 | QSVVTQPPSVSAAPGQKVTISCSGSSSNIGNNYVSWYQQLPGTAPKLLIYDNNKRPSGI | anti-AFP V_{L} |
| | PDRFSGSKSGTSATLGITGLQTGDEADYYCGTWDGSLYTMLFGGGTKLTVLG | |
| 192 | GFTFDDYA | Anti-AFP_HCDR1 |
| 193 | ISWNSGSI | Anti-AFP_HCDR2 |
| 194 | AKDIHSGSYYGLLYYAMDV | Anti-AFP_HCDR3 |
| 195 | QMQLVQSGGGLVQPGRSLRLSCAASGFTFDDYAMHWVRQAPGKGLEWVSGISWNS | anti-AFP V_{H} |
| | GSIGYADSVKGRFTISRDNAKNSLYLQMNSLRAEDTALYYCAKDIHSGSYYGLLYYA | |
| | MDVWGQGTTVTVSS | |
| 196 | SSNIGAGYD | Anti-AFP_LCDR1 |
| 197 | GNS | Anti-AFP_LCDR2 |
| 198 | QSYDSSLSGSGV | Anti-AFP_LCDR3 |
| 199 | QSVLTQPPSVSGAPGQRVTISCTGSSSNIGAGYDVHWYQQLPGTAPKLLIFGNSNRPSG | anti-AFP VL |
| | VPDRFSGFKSGTSASLAITGLQAEDEADYFCQSYDSSLSGSGVFGTGTKVTVLG | |
| 200 | GYTFTSYG | Anti-AFP_HCDR1 |
| 201 | ISAYNGNT | Anti-AFP_HCDR2 |
| 202 | ARFQDWWYLGQFDQ | Anti-AFP_HCDR3 |
| 203 | EVQLVQSGAEVKKPGASVKVSCKASGYTFTSYGISWVRQAPGQGLEWMGWISAYNG | anti-AFP V_{H} |
| | NTNYAQKLQGRVTMTTDTSTSTAYMELRSLRSDDTAVYYCARFQDWWYLGQFDQW | |
| | GQGTLVTVSS | |
| 204 | GSDVGVYYY | Anti-AFP_LCDR1 |
| 205 | DVD | Anti-AFP_LCDR2 |
| 206 | ASYTNRNSLGYV | Anti-AFP_LCDR3 |
| 207 | QSALTQPASVSGSPGQSITISCTATGSDVGVYYYVSWYQQHPGKAPKVMIYDVDNRP | anti-AFP V_{L} |
| | PGVSNRFSGSKSGNTASLTISGLQAEDEADYYCASYTNRNSLGYVFGTGTKVTVLG | |
| 208 | GGSFSGYY | Anti-GPC3_HCDR1 |
| 209 | INHSGST | Anti-GPC3_HCDR2 |
| 210 | ARGYGGRFDY | Anti-GPC3_HCDR3 |
| 211 | QVQLQQWGAGLLKPSETLSLTCAVYGGSFSGYYWSWIRQPPGKGLEWIGEINHSGST | anti-GPC3 V_{H}_clone |
| | NYNPSLKSRVTISVDTSKNQFSLELSSVTAADTAVYYCARGYGGRFDYWGQGTLVTV | 34 |
| | SS | |
| 212 | SSNIGSNN | Anti-GPC3_LCDR1 |
| 213 | SNH | Anti-GPC3_LCDR2 |
| 214 | AAWDDSLDGYL | Anti-GPC3_LCDR3 |
| 215 | QPVLTQPPSASGTPGQRVTISCSGSSSNIGSNNVIWYQQLPGAAPKLLIYSNHRRPSGVP | anti-GPC3 V_{L}_clone |
| | DRFSGSRSGTSASLAISGLQSEDEADYYCAAWDDSLDGYLFGTGTKVTVLG | 34 |
| 216 | GFTFSSYA | Anti-GPC3_HCDR1 |
| 217 | IYSGGSST | Anti-GPC3_HCDR2 |
| 218 | ARTSYLNHGDY | Anti-GPC3_HCDR3 |
| 219 | QVQLVESGGGLVQPGGSLRLSCAASGFTFSSYAMSWVRQAPGKGLEWVSVIYSGGSS | anti-GPC3 V_{H}_clone |
| | TYYADSVKGRFTISRDNSKNTLYLQMNSLRAEDTAVYYCARTSYLNHGDYWGQGTL | 37 |
| | VTVSS | |
| 220 | RSNIGSDY | Anti-GPC3_LCDR1 |
| 221 | GDN | Anti-GPC3_LCDR2 |
| 222 | GTWDYTLNGVV | Anti-GPC3_LCDR3 |
| 223 | QSVLTQPPSVSAAPGQRVTISCSGTRSNIGSDYVSWYQHLPGTAPKLLVYGDNLRPSGI | anti-GPC3 V_{L}_clone |
| | PDRFSASKSGTSATLGITGLQTGDEADYYCGTWDYTLNGVVFGGGTKLTVLG | 37 |
| 224 | GFTFSDYY | Anti-GPC3_HCDR1 |
| 225 | ISSSGSTI | Anti-GPC3_HCDR2 |
| 226 | ARASDLYGD | Anti-GPC3_HCDR3 |
| 227 | QMQLVQSGGGLVKPGGSLRLSCAASGFTFSDYYMSWIRQAPGKGLEWVSYISSSGSTI | anti-GPC3 V_{H}_clone |
| | YYADSVKGRFTISRDNAKNSLYLQMNSLRAEDTAVYYCARASDLYGDWGQGTLVT | 45 |
| | VSS | |
| 228 | TSNIGTNT | Anti-GPC3_LCDR1 |
| 229 | SNN | Anti-GPC3_LCDR2 |
| 230 | AAWDDSLNGVV | Anti-GPC3_LCDR3 |
| 231 | QSVLTQPPSVSGTPGQRVIISCPGSTSNIGTNTVNWYQQFPGTAPKLLIYSNNQRPSGVP | anti-GPC3 V_{L}_clone |
| | DRFSGSKSGTSASLAISGLQSEDEADYYCAAWDDSLNGVVFGGGTKLTVLG | 45 |
| 232 | GYRFSNYG | Anti-GPC3_HCDR1 |
| 233 | ISGSNGNT | Anti-GPC3_HCDR2 |
| 234 | ARGNRRYYSPIIDP | Anti-GPC3_HCDR3 |
| 235 | QVQLVQSGAEVKKPGASVTVSCKASGYRFSNYGVSWVRQAPGQGLEWMGWISGSN | anti-GPC3 V_{H}_clone |
| | GNTNYAQKFLGRVTMTTDTSTTTAYMELSSLRSDDTAVYYCARGNRRYYSPIIDPWG | 46 |
| | QGTLVTVSS | |
| 236 | SSNFGSNT | Anti-GPC3_LCDR1 |
| 237 | SNT | Anti-GPC3_LCDR2 |
| 238 | AAWDDSLTGVV | Anti-GPC3_LCDR3 |
| 239 | QAVLTQPPSVSGTPGQRVTISCSGSSSNFGSNTVHWYQQVPGTAPKLLIFSNTQRPSEIP | anti-GPC3 V_{L}_clone |
| | DRFSGSKSGTSASLAISGLQSEDEADYYCAAWDDSLTGVVFGGGTKLTVLG | 46 |
| 240 | GGTFGSYA | Anti-GPC3_HCDR1 |
| 241 | IIPVLGRT | Anti-GPC3_HCDR2 |
| 242 | ARTNDS | Anti-GPC3_HCDR3 |
| 243 | EVQLVQSGAEVRKPGSSVKVSCQASGGTFGSYAISWVRQAPGQGLEWMGRIIPVLGR | anti-GPC3 V_{H}_clone |
| | TKYAQKFQGRVTVTADTSTSTVYMELTSLTSEDTAVYYCARTNDSWGQGTLVTVSS | 87 |
| 244 | QSLLHSNGYNY | Anti-GPC3_LCDR1 |
| 245 | LGS | Anti-GPC3_LCDR2 |
| 246 | MQALQTPWT | Anti-GPC3_LCDR3 |
| 247 | DVVMTQSPLSLPVTPGEPASVSCRSSQSLLHSNGYNYLDWYLQKPGQSPQLLIYLGSN | anti-GPC3 V_{L}_clone |
| | RASGVPDRFSGSGSGTDFTLKISRVEAEDVGVYYCMQALQTPWTFGQGTKVEIKR | 87 |
| 248 | GYTFTSYY | Anti-GPC3_HCDR1 |
| 249 | INPSGGST | Anti-GPC3_HCDR2 |
| 250 | ARWHGGPYDY | Anti-GPC3_HCDR3 |
| 251 | QVQLVQSGAEVKKPGASVKVSCKASGYTFTSYYMHWVRQAPGQGLEWMGIINPSGG | Anti-GPC3 V_{H} |
| | STSYAQKFQGRVTMTRDTSTSTVYMELSSLRSEDTAVYYCARWHGGPYDYWGQGTL | |
| | VTVSS | |
| 252 | NIGSKS | Anti-GPC3_LCDR1 |
| 253 | YDS | Anti-GPC3_LCDR2 |
| 254 | QVWDSSSDHYV | Anti-GPC3_LCDR3 |
| 255 | QPVLTQPPSVSVAPGKTARITCGGNNIGSKSWYQQKPGQAPVLVIYYDSDRPSGIP | Anti-GPC3 V_{L} |
| | ERFSGSNSGNTATLTISRVEAGDEADYYCQVWDSSSDHYVFGTGTKVTVLG | |
| 256 | GYTFASHG | Anti-GPC3_HCDR1 |
| 257 | ISPYTGNT | Anti-GPC3_HCDR2 |
| 258 | ARGKRTLASCFDY | Anti-GPC3_HCDR3 |
| 259 | QVQLVQSGADVRKPGASVKVSCKASGYTFASHGISWVRQAPGQGLEWLGWISPYTG | Anti-GPC3 V_{H} |
| | NTNYAQKFQGRVTMATDTSTSTAYMELRSLRSDDTAIYYCARGKRTLASCFDYWGQ | |
| | GTLVTVSS | |
| 260 | NIGSKS | Anti-GPC3_LCDR1 |
| 261 | DDS | Anti-GPC3_LCDR2 |
| 262 | QVWDSSSDHV | Anti-GPC3_LCDR3 |
| 263 | QSVLTQPPSVSVAPGKTARITCGGNNIGSKSVHWYQQKPGQAPVLVVYDDSDRPSGIP | Anti-GPC3 V_{L} |
| | ERFSGSNSGNTATLTISRVEAGDEADYYCQVWDSSSDHVFGTGTKVTVLG | |
| 264 | KLVVVGAGGV | KRAS peptide can be |
| | | targeted by CAR |
| 265 | KLVVVGAVGV | KRAS peptide can be |
| | | targeted by CAR |
| 266 | KLVVVGACGV | KRAS peptide can be |
| | | targeted by CAR |
| 267 | KLVVVGADGV | KRAS peptide can be |
| | | targeted by CAR |
| 268 | KLVVVGASGV | KRAS peptide can be |
| | | targeted by CAR |
| 269 | LVVVGAGGV | KRAS peptide can be |
| | | targeted by CAR |
| 270 | LVVVGAVGV | KRAS peptide can be |
| | | targeted by CAR |
| 271 | LVVVGACGV | KRAS peptide can be |
| | | targeted by CAR |
| 272 | LVVVGADGV | KRAS peptide can be |
| | | targeted by CAR |
| 273 | GGTFSSYA | Anti-KRAS_HCDR1 |
| 274 | IIPIFGKG | Anti-KRAS_HCDR2 |
| 275 | ARHIPTFSFDY | Anti-KRAS_HCDR3 |
| 276 | QVQLVQSGAEVKKPGSSVKVSCKASGGTFSSYAISWVRQAPGQGLEWMGGIIPIFGK | Anti-KRAS_V_{H} |
| | GNYPQKFQGRVTITADESTGTAYMELSSLRSEDTAVYYCARHIPTFSFDYWGQGTLV | |
| | TVSS | |
| 277 | SSNIGAGYD | Anti-KRAS_LCDR1 |
| 278 | GNS | Anti-KRAS_LCDR2 |
| 279 | QSYDSSLSGYV | Anti-KRAS_LCDR3 |
| 280 | QSVLTQPPSVSGAPGQRVTISCTGSSSNIGAGYDVHWYQQLPGTAPKLLIYGNSNRPS | Anti-KRAS_V_{L} |
| | GVPDRFSGSKSGTSASLAITGLQAEDEADYYCQSYDSSLSGYVFGTGTKVTVLG | |
| 281 | QSVLTQPPSVSGAPGQRVTISCTGSSSNIGAGYDVHWYQQLPGTAPKLLIYGNSNRPS | Anti-KRAS_scFv |
| | GVPDRFSGSKSGTSASLAITGLQAEDEADYYCQSYDSSLSGYVFGTGTKVTVLGSRGG | |
| | GGSGGGGSGGGGSLEMAQVQLVQSGAEVKKPGSSVKVSCKASGGTFSSYAISWVRQ | |
| | APGQGLEWMGGIIPIFGKGNYPQKFQGRVTITADESTGTAYMELSSLRSEDTAVYYCA | |
| | RHIPTFSFDYWGQGTLVTVSS | |
| 282 | GGTFSSYT | Anti-KRAS_HCDR1 |
| 283 | FIPISGTV | Anti-KRAS_HCDR2 |
| 284 | ARPLDWTEDI | Anti-KRAS_HCDR3 |
| 285 | QVQLVQSGAEVKKPGSSVKVSCKASGGTFSSYTINWVRQAPGQGLEWMGGFIPISGT | Anti-KRAS_V_{H} |
| | VNYAQKFQGRVTITADESTSTAYMELSSLRSEDTAVYYCARPLDWTEDIWGQGTLVT | |
| | VSS | |
| 286 | SSNIGAGYD | Anti-KRAS_LCDR1 |
| 287 | GNS | Anti-KRAS_LCDR2 |
| 288 | QSYDSSLSGSV | Anti-KRAS_LCDR3 |
| 289 | QSVLTQPPSVSGAPGQRVTISCTGSSSNIGAGYDVHWYQQLPGTAPKLLIYGNSNRPS | Anti-KRAS_V_{L} |
| | GVPDRFSGSKSGTSASLAITGLQAEDEADYYCQSYDSSLSGSVFGTGTKVTVLG | |
| 290 | QSVLTQPPSVSGAPGQRVTISCTGSSSNIGAGYDVHWYQQLPGTAPKLLIYGNSNRPS | Anti-KRAS_scFv |
| | GVPDRFSGSKSGTSASLAITGLQAEDEADYYCQSYDSSLSGSVFGTGTKVTVLGSRGG | |
| | GGSGGGGSGGGGSLEMAVQLVQSGAEVKKPGSSVKVSCKASGGTFSSYTINWVRQA | |
| | PGQGLEWMGGFIPISGTVNYAQKFQGRVTITADESTSTAYMELSSLRSEDTAVYYCAR | |
| | PLDWTEDIWGQGTLVTVSS | |
| 291 | GYTFTAYY | Anti-KRAS_HCDR1 |
| 292 | MNTNNGAT | Anti-KRAS_HCDR2 |
| 293 | ARGDISQDFADV | Anti-KRASHCDR3 |
| 294 | EVQLVQSGAEVKKPGASVKVSCKASGYTFTAYYLHWLRQAPGQGLEWMGWMNTN | Anti-KRAS_V_{H} |
| | NGATRYAQKFQDRVTMTRDTSINTAYMEMSGLSSDDTAMYYCARGDISQDFADVW | |
| | GQGTLVTVSS | |
| 295 | SGSIASNY | Anti-KRAS_LCDR1 |
| 296 | EDN | Anti-KRAS_LCDR2 |
| 297 | QSYDDINHWV | Anti-KRAS_LCDR3 |
| 298 | NFMLTQPHSVSESPGKTVTISCTGSSGSIASNYVQWYQQRPGSAPTILIYEDNKRPSGV | Anti-KRAS_V_{L} |
| | PDRFSGSIDSSSNSASLTISGLKTGDEADYYCQSYDDINHWVFGGGTKLTVLG | |
| 299 | NFMLTQPHSVSESPGKTVTISCTGSSGSIASNYVQWYQQRPGSAPTILIYEDNKRPSGV | Anti-KRAS_scFv |
| | PDRFSGSIDSSSNSASLTISGLKTGDEADYYCQSYDDINHWVFGGGTKLTVLGSRGGG | |
| | GSGGGGSGGGGSLEMAEVQLVQSGAEVKKPGASVKVSCKASGYTFTAYYLHWLRQ | |
| | APGQGLEWMGWMNTNNGATRYAQKFQDRVTMTRDTSINTAYMEMSGLSSDDTAM | |
| | YYCARGDISQDFADVWGQGTLVTVSS | |
| 300 | GYTFTAYY | Anti-KRAS_HCDR1 |
| 301 | MNTNNGAT | Anti-KRAS_HCDR2 |
| 302 | ARGDISQDFADV | Anti-KRAS_HCDR3 |
| 303 | EVQLVQSGAEVKKPGASVKVSCKASGYTFTAYYLHWLRQAPGQGLEWMGWMNTN | Anti-KRAS_V_{H} |
| | NGATRYAQKFQDRVTMTRDTSINTAYMEMSGLSSDDTAMYYCARGDISQDFADVW | |
| | GQGTLVTVSS | |
| 304 | SGSIASNY | Anti-KRAS_LCDR1 |
| 305 | EDN | Anti-KRAS_LCDR2 |
| 306 | QSYDDINHWV | Anti-KRAS_LCDR3 |
| 307 | NFMLTQPHSVSESPGKTVTISCTGSSGSIASNYVQWYQQRPGSAPTILIYEDNKRPSGV | Anti-KRAS_V_{L} |
| | PDRFSGSIDSSSNSASLTISGLKTGDEADYYCQSYDDINHWVFGGGTKLTVLG | |
| 308 | NFMLTQPHSVSESPGKTVTISCTGSSGSIASNYVQWYQQRPGSAPTILIYEDNKRPSGV | Anti-KRAS_scFv |
| | PDRFSGSIDSSSNSASLTISGLKTGDEADYYCQSYDDINHWVFGGGTKLTVLGSRGGG | |
| | GSGGGGSGGGGSLEMAEVQLVQSGAEVKKPGASVKVSCKASGYTFTAYYLHWLRQ | |
| | APGQGLEWMGWMNTNNGATRYAQKFQDRVTMTRDTSINTAYMEMSGLSSDDTAM | |
| | YYCARGDISQDFADVWGQGTLVTVSS | |
| 309 | GGSFSGYY | Anti-KRAS_HCDR1 |
| 310 | VNHSGNT | Anti-KRAS_HCDR2 |
| 311 | ARYFPPMIDV | Anti-KRAS_HCDR3 |
| 312 | QVQLQQWGAGLLKPSETLSLTCAVYGGSFSGYYWSWIRQSPGKGLEWIGEVNHSGN | Anti-KRAS_V_{H} |
| | TNYNPSLKSRVTISLDTSKNQFSLKLNSVTAADTAVYYCARYFPPMIDVWGQGTLVT | |
| | VSS | |
| 313 | SSNIENNY | Anti-KRAS_LCDR1 |
| 314 | DNN | Anti-KRAS_LCDR2 |
| 315 | GTWDSSLSAYV | Anti-KRAS_LCDR3 |
| 316 | GQSVVTQPPSVSAAPGQKVTISCSGSSSNIENNYVSWYQQLPGTAPKLLIYDNNKRPS | Anti-KRAS_V_{L} |
| | GIPDRFSGSKSGTSATLGITGLQTGDEADYYCGTWDSSLSAYVFGTGTKVTVLG | |
| 317 | QSVVTQPPSVSAAPGQKVTISCSGSSSNIENNYVSWYQQLPGTAPKLLIYDNNKRPSGI | Anti-KRAS_scFv |
| | PDRFSGSKSGTSATLGITGLQTGDEADYYCGTWDSSLSAYVFGTGTKVTVLGSRGGG | |
| | GSGGGGSGGGGSLEMAQVQLQQWGAGLLKPSETLSLTCAVYGGSFSGYYWSWIRQS | |
| | PGKGLEWIGEVNHSGNTNYNPSLKSRVTISLDTSKNQFSLKLNSVTAADTAVYYCAR | |
| | YFPPMIDVWGQGTLVTVSS | |
| 318 | GGSISSSSYY | Anti-KRAS_HCDR1 |
| 319 | INHSGST | Anti-KRAS_HCDR2 |
| 320 | ARYSHHVDSGGYDV | Anti-KRAS_HCDR3 |
| 321 | QLQLQESGPGLVKPSETLSLSCTVSGGSISSSSYYWGWIRQPPGKGLEWIGEINHSGST | Anti-KRAS_V_{H} |
| | NYNPSLKSRVTISVDTSKNQFSLKLSSVTAADTAVYYCARYSHHVDSGGYDVWGQG | |
| | TLVTVSS | |
| 322 | SSNIGNNY | Anti-KRAS_LCDR1 |
| 323 | DNN | Anti-KRAS_LCDR2 |
| 324 | GTWDSSLSAVV | Anti-KRAS_LCDR3 |
| 325 | QSVVTQPPSVSAAPGQKVTISCSGSSSNIGNNYVSWYQQLPRTAPRLLIYDNNKRPSGI | Anti-KRAS_V_{L} |
| | PDRFSASKSGTSATLGITGLQTGDEADYYCGTWDSSLSAVVFGGGTKLTVLG | |
| 326 | QSVVTQPPSVSAAPGQKVTISCSGSSSNIGNNYVSWYQQLPRTAPRLLIYDNNKRPSGI | Anti-KRAS_scFv |
| | PDRFSASKSGTSATLGITGLQTGDEADYYCGTWDSSLSAVVFGGGTKLTVLGSRGGG | |
| | GSGGGGSGGGGSLEMAQLQLQESGPGLVKPSETLSLSCTVSGGSISSSSYYWGWIRQP | |
| | PGKGLEWIGEINHSGSTNYNPSLKSRVTISVDTSKNQFSLKLSSVTAADTAVYYCARY | |
| | SHHVDSGGYDVWGQGTLVTVSS | |
| 327 | GGTFSSYG | Anti-KRAS_HCDR1 |
| 328 | IIPIFGTP | Anti-KRAS_HCDR2 |
| 329 | ARSYYGYFDG | Anti-KRAS_HCDR3 |
| 330 | EVQLVESGAEVKEPGSSVKVSCKASGGTFSSYGISWIRQAPGQGLEWMGEIIPIFGTPN | Anti-KRAS_V_{H} |
| | YAQKFQGRVTITADESTSTAYVELSSLRSDDTAVYYCARSYYGYFDGWGQGTLVTVS | |
| | S | |
| 331 | QDISNY | Anti-KRAS_LCDR1 |
| 332 | DAS | Anti-KRAS_LCDR2 |
| 333 | QQYKSYPLT | Anti-KRAS_LCDR3 |
| 334 | DIQMTQSPSSLSASVGDRVTITCQASQDISNYLNWYQQKPGKAPKLLIYDASNLETGV | Anti-KRAS_V_{L} |
| | PSRFSGSGSGTDFTFTISSLQPDDFATYYCQQYKSYPLTFGGGTKVEIKR | |
| 335 | DIQMTQSPSSLSASVGDRVTITCQASQDISNYLNWYQQKPGKAPKLLIYDASNLETGV | Anti-KRAS_scFv |
| | PSRFSGSGSGTDFTFTISSLQPDDFATYYCQQYKSYPLTFGGGTKVEIKRSRGGGGSGG | |
| | GGSGGGGSLEMAEVQLVESGAEVKEPGSSVKVSCKASGGTFSSYGISWIRQAPGQGL | |
| | EWMGEIIPIFGTPNYAQKFQGRVTITADESTSTAYVELSSLRSDDTAVYYCARSYYGY | |
| | FDGWGQGTLVTVSS | |
| 336 | GYTFTSYY | Anti-KRAS_HCDR1 |
| 337 | INPSGGST | Anti-KRAS_HCDR2 |
| 338 | ARSMYQYFLDS | Anti-KRAS_HCDR3 |
| 339 | EVQLVESGAEVKKPGASVKISCKASGYTFTSYYMHWVRQAPGQGLEWMGIINPSGGS | Anti-KRAS_V_{H} |
| | TSYAQKFQGRVTMTRDTSTSTVYMELSSLRSEDTAVYYCARSMYQYFLDSWGQGTL | |
| | VTVSS | |
| 340 | SSNIGAGYD | Anti-KRAS_LCDR1 |
| 341 | GNI | Anti-KRAS_LCDR2 |
| 342 | QSYDSNLSG | Anti-KRAS_LCDR3 |
| 343 | QSVVTQPPSVSGAPGQRVTISCTGSSSNIGAGYDVHWYQQLPGTAPKLLIYGNINRPSG | Anti-KRAS_V_{L} |
| | VPDRFSGSKSGTSASLAITGLQAEDEADYYCQSYDSNLSGYVFATGTKVTVLG | |
| 344 | QSVVTQPPSVSGAPGQRVTISCTGSSSNIGAGYDVHWYQQLPGTAPKLLIYGNINRPSG | Anti-KRAS_scFv |
| | VPDRFSGSKSGTSASLAITGLQAEDEADYYCQSYDSNLSGYVFATGTKVTVLGSRGG | |
| | GGSGGGGSGGGGSLEMAEVQLVESGAEVKKPGASVKISCKASGYTFTSYYMHWVRQ | |
| | APGQGLEWMGIINPSGGSTSYAQKFQGRVTMTRDTSTSTVYMELSSLRSEDTAVYYC | |
| | ARSMYQYFLDSWGQGTLVTVSS | |
| 345 | LTDAVKVMDL | PSA peptide can be |
| | | targeted by CAR |
| 346 | KLQCVDLHV | PSA peptide can be |
| | | targeted by CAR |
| 347 | VISNDVCAQV | PSA peptide can be |
| | | targeted by CAR |
| 348 | FLTPKKLQCV | PSA peptide can be |
| | | targeted by CAR |
| 349 | ALQCVDLHV | PSA peptide can be |
| | | targeted by CAR |
| 350 | KLACVDLHV | PSA peptide can be |
| | | targeted by CAR |
| 351 | KLQAVDLHV | PSA peptide can be |
| | | targeted by CAR |
| 352 | KLQCADLHV | PSA peptide can be |
| | | targeted by CAR |
| 353 | KLQCVALHV | PSA peptide can be |
| | | targeted by CAR |
| 354 | KLQCVDAHV | PSA peptide can be |
| | | targeted by CAR |
| 355 | KLQCVDLAV | PSA peptide can be |
| | | targeted by CAR |
| 356 | GGTFSSYA | Anti-PSA_HCDR1 |
| 357 | GFTFSSYA | Anti-PSA_HCDR1 |
| 358 | GYNFLNYG | Anti-PSA_HCDR1 |
| 359 | GYTFTGYY | Anti-PSA_HCDR1 |
| 360 | GGSFSDYY | Anti-PSA_HCDR1 |
| 361 | GYTFTSYG | Anti-PSA_HCDR1 |
| 362 | GGTFSSYA | Anti-PSA_HCDR1 |
| 363 | GYTFTSYG | Anti-PSA_HCDR1 |
| 364 | GYTFTSYY | Anti-PSA_HCDR1 |
| 365 | GYTFTGYF | Anti-PSA_HCDR1 |
| 366 | GGTFSSYA | Anti-PSA_HCDR1 |
| 367 | GYSFTSYW | Anti-PSA_HCDR1 |
| 368 | GYSFTSYW | Anti-PSA_HCDR1 |
| 369 | GYSFTSYR | Anti-PSA_HCDR1 |
| 370 | GYTFTNYG | Anti-PSA_HCDR1 |
| 371 | IIPIPGIT | Anti-PSA_HCDR2 |
| 372 | ISGSGGST | Anti-PSA_HCDR2 |
| 373 | ISTYTGNT | Anti-PSA_HCDR2 |
| 374 | FDPEDGET | Anti-PSA_HCDR2 |
| 375 | INHSGGT | Anti-PSA_HCDR2 |
| 376 | ISAYNGNT | Anti-PSA_HCDR2 |
| 377 | INPNSGGT | Anti-PSA_HCDR2 |
| 378 | ISAYNGNT | Anti-PSA_HCDR2 |
| 379 | FDPEDGET | Anti-PSA_HCDR2 |
| 380 | FDPEDGET | Anti-PSA_HCDR2 |
| 381 | IIPILGIA | Anti-PSA_HCDR2 |
| 382 | IYPGDSDT | Anti-PSA_HCDR2 |
| 383 | IYPGDSDT | Anti-PSA_HCDR2 |
| 384 | IDPSDSYT | Anti-PSA_HCDR2 |
| 385 | ARSYKWGSSLVDA | Anti-PSA_HCDR3 |
| 386 | ARNYYSQYWMMDL | Anti-PSA_HCDR3 |
| 387 | ARSSEYYTWDH | Anti-PSA_HCDR3 |
| 388 | ARYGFDY | Anti-PSA_HCDR3 |
| 389 | ARYNEYGSGYDK | Anti-PSA_HCDR3 |
| 390 | ARSSQYYVWDS | Anti-PSA_HCDR3 |
| 391 | ARWSYYYFQQFWSLDG | Anti-PSA_HCDR3 |
| 392 | ARTNYNKYDI | Anti-PSA_HCDR3 |
| 393 | ARYSYDY | Anti-PSA_HCDR3 |
| 394 | ARYSYDL | Anti-PSA_HCDR3 |
| 395 | ARVSQPVYGSSTYDI | Anti-PSA_HCDR3 |
| 396 | ARLVVPDAFDI | Anti-PSA_HCDR3 |
| 397 | ARWGSRGFLDAFDI | Anti-PSA_HCDR3 |
| 398 | ARWGLSWDGWGVTDY | Anti-PSA_HCDR3 |
| 399 | ARYNYDT | Anti-PSA_HCDR3 |
| 400 | ARSFGAGYDS | Anti-PSA_HCDR3 |
| 401 | ARYPWDH | Anti-PSA_HCDR3 |
| 402 | ARSSYYGYLSDG | Anti-PSA_HCDR3 |
| 403 | EVQLVQSGAEVKRPGSSVKVSCKASGGTFSSYAINWVRRAPGQGLEWMGKIIPIPGIT | Anti-PSA_V_{H} |
| | NYAQKFQDRVTFTADTSTNIAYMELSSLRSEDTAMYYCARSYKWGSSLVDAWGQGT | |
| | LVTVSS | |
| 404 | EVQLVESGGGLVQPGGSLRLSCAASGFTFSSYAMSWVRQAPGKGLEWVSAISGSGGS | Anti-PSA_V_{H} |
| | TYYADSVKGRFTISRDNSKNTLYLQMNSLRAEDTAVYYCARNYYSQYWMMDLWGQ | |
| | GTLVTVSS | |
| 405 | QVQLVQSGAEVKKPGDSVKVSCKPSGYNFLNYGINWVRQAPGQGLEWMGWISTYT | Anti-PSA_V_{H} |
| | GNTNYAQKLQGRVTFTTDTSTSTAYMEMRSLRSDDTAVYYCARSSEYYTWDHWGQ | |
| | GTLVTVSS | |
| 406 | EVQLVQSGAEVKKPGASVKVSCKASGYTFTGYYIHWVRQAPGQGLEWMGGFDPED | Anti-PSA_V_{H} |
| | GETIYAQKFQDRVTMTADTSTDTAYMELSSLRSEDTAVYYCARYGFDYWGQGTLVT | |
| | VSS | |
| 407 | QVQLQQWGAGLLKPSETLSLTCAVKGGSFSDYYWSWIRQPPGKGLEWIGEINHSGGT | Anti-PSA_V_{H} |
| | NYNPSLKSRVTISVDTSKNQFSLKLLSVTAADTAVYYCARYNEYGSGYDKWGQGTL | |
| | VTVSS | |
| 408 | QVQLVQSGAEVKKPGASVKVSCKASGYTFTSYGISWVRQAPGQGLEWMGWISAYN | Anti-PSA_V_{H} |
| | GNTNYAQKLQGRVTMTTDTSTSTAYMELRSLRSDDTAVYYCARSSQYYVWDSWGQ | |
| | GTLVTVSS | |
| 409 | QVQLVQSGAEVKKPGSSVKVSCKASGGTFSSYAISWVRQAPGQGLEWMGWINPNSG | Anti-PSA_V_{H} |
| | GTNYAQKFQGRVTMTRDTSISTAYMELSRLRSDDTAVYYCARWSYYYFQQFWSLDG | |
| | WGQGTLVTVSS | |
| 410 | QMQLVQSGSEVKKPGASVKVSCKASGYTFTSYGISWVRQAPGQGLEWMGWISAYN | Anti-PSA_V_{H} |
| | GNTDYVQKLQGRVTMTTDTSTNTAYMELGSLGSDDTAVYYCARTNYNKYDIWGQG | |
| | TLVTVSS | |
| 411 | QVQLVQSGAEVKKPGASVKVSCKASGYTFTSYYMHWVRQAPGQGLEWMGGFDPED | Anti-PSA_V_{H} |
| | GETIYAQKFQGRVTMTEDTSTDTAYMGLSSLRSEDTAVYYCARYSYDYWGQGTLVT | |
| | VSS | |
| 412 | EVQLVQSGAEVKKPGASVKVSCKASGYTFTGYFMHWVRQAPGQGLEWMGGFDPED | Anti-PSA_V_{H} |
| | GETIYAQKFQGRVTMTEDTSTDTAYMELSSLRSEDTAVYYCARYSYDLWGQGTLVT | |
| | VSS | |
| 413 | QVQLVQSGAEVKKPGSSVKVSCKASGGTFSSYAISWVRQAPGQGLEWMGRIIPILGIA | Anti-PSA_V_{H} |
| | NYAQKFQGRVTITADKSTSTAYMELSSLRSEDTAVYYCARVSQPVYGSSTYDIWGQG | |
| | TLVTVSS | |
| 414 | QMQLVQSGAEVKKPGESLKISCKGSGYSFTSYWIGWVRQMPGKGLEWMGIIYPGDS | Anti-PSA_V_{H} |
| | DTRYSPSFQGQVTISADKSISTAYLQWSSLKASDTAMYYCARLVVPDAFDIWGQGTM | |
| | VTVSS | |
| 415 | QVQLVQSGAEVKKPGESLKISCKGSGYSFTSYWIGWVRQMPGKGLEWMGIIYPGDSD | Anti-PSA_V_{H} |
| | TRYSPSFQGQVTISADKSISTAYLQWSSLKASDTAMYYCARWGSRGFLDAFDIWGQG | |
| | TMVTVSS | |
| 416 | EVQLVQSGAEVKKPGESLKISCKGSGYSFTSYRIGWVRQMPGKGLEWMGIIYPGDSD | Anti-PSA_V_{H} |
| | TRYSPSFQGQVTISADKSISTAYLQWSSLKASDTAMYYCARWGLSWDGWGVTDYW | |
| | GQGTLVTVSS | |
| 417 | QVQLVQSGAEVKKPGASVKVSCKASGYTFTSYYMHWVRQAPGKGLEWMGGFDPED | Anti-PSA_V_{H} |
| | GETIYAQKFQGRVTMTEDTSTDTAYMELSSLRSEDTAVYYCARYNYDTWGQGTLVT | |
| | VSS | |
| 418 | EVQLVQSGAEVKKPGESLKISCKGSGYSFTSYWIGWVRQMPGKGLEWMGRIDPSDSY | Anti-PSA_V_{H} |
| | TNYSPSFQGHVTISADKSISTAYLQWSSLKASDTAMYYCARSFGAGYDSWGQGTLVT | |
| | VSS | |
| 419 | QVQLVQSGAEVKKPGASVKVSCKASGYTFTSYYMHWVRQAPGKGLEWMGGFDPED | Anti-PSA_V_{H} |
| | GETIYAQKFQGRVTMTEDTSTDTAYMELSSLRSEDTAVYYCARYPWDHWGQGTLVT | |
| | VSS | |
| 420 | QVQLVQSGAEVKKPGASVKVSCKTSGYTFTNYGISWVRQAPGQGLEWMGWISAYN | Anti-PSA_V_{H} |
| | GNTNYAQNLQGRVTMTTDTSTSTAYMELRSLRSDDTAVYYCARSSYYGYLSDGWG | |
| | QGTLVTVSS | |
| 421 | NSNIGSNT | Anti-PSA_LCDR1 |
| 422 | SSNFGAGYD | Anti-PSA_LCDR1 |
| 423 | SSNIGAGYD | Anti-PSA_LCDR1 |
| 424 | TGAVTSGYY | Anti-PSA_LCDR1 |
| 425 | SYNIGNNY | Anti-PSA_LCDR1 |
| 426 | SSNFGAGYD | Anti-PSA_LCDR1 |
| 427 | SSNIGSNT | Anti-PSA_LCDR1 |
| 428 | SSNIGAGYD | Anti-PSA_LCDR1 |
| 429 | TGAVTSGYY | Anti-PSA_LCDR1 |
| 430 | TGAVTSGYY | Anti-PSA_LCDR1 |
| 431 | SSNLGSNS | Anti-PSA_LCDR1 |
| 432 | SSNIGNNY | Anti-PSA_LCDR1 |
| 433 | SSNIGNNY | Anti-PSA_LCDR1 |
| 434 | QSISSY | Anti-PSA_LCDR1 |
| 435 | TGTVTSTYY | Anti-PSA_LCDR1 |
| 436 | SSDVGGYNY | Anti-PSA_LCDR1 |
| 437 | SSNIGTNY | Anti-PSA_LCDR1 |
| 438 | SNN | Anti-PSA_LCDR2 |
| 439 | GDT | Anti-PSA_LCDR2 |
| 440 | GNS | Anti-PSA_LCDR2 |
| 441 | TTG | Anti-PSA_LCDR2 |
| 442 | DNN | Anti-PSA_LCDR2 |
| 443 | GNS | Anti-PSA_LCDR2 |
| 444 | STS | Anti-PSA_LCDR2 |
| 445 | DNH | Anti-PSA_LCDR2 |
| 446 | DNY | Anti-PSA_LCDR2 |
| 447 | DND | Anti-PSA_LCDR2 |
| 448 | AAS | Anti-PSA_LCDR2 |
| 449 | DVS | Anti-PSA_LCDR2 |
| 450 | STN | Anti-PSA_LCDR2 |
| 451 | ATWDDSLNGPV | Anti-PSA_LCDR3 |
| 452 | QSYDTSLSGSV | Anti-PSA_LCDR3 |
| 453 | QSYDSSLSGWV | Anti-PSA_LCDR3 |
| 454 | LLYSGGVWV | Anti-PSA_LCDR3 |
| 455 | GTWESSLSAYV | Anti-PSA_LCDR3 |
| 456 | QSYDSSLSGWV | Anti-PSA_LCDR3 |
| 457 | AAWDDSLNGRWV | Anti-PSA_LCDR3 |
| 458 | QSYDSSLSEV | Anti-PSA_LCDR3 |
| 459 | LLYYGGAYV | Anti-PSA_LCDR3 |
| 460 | LLYYGGAQWV | Anti-PSA_LCDR3 |
| 461 | AAWDDSLNSVV | Anti-PSA_LCDR3 |
| 462 | GTWDSSLSAGV | Anti-PSA_LCDR3 |
| 463 | GTWDSSLSSGV | Anti-PSA_LCDR3 |
| 464 | QQSYSTPFT | Anti-PSA_LCDR3 |
| 465 | LVFYGGVWV | Anti-PSA_LCDR3 |
| 466 | SSYTSSSRYV | Anti-PSA_LCDR3 |
| 467 | LLYYGGQGV | Anti-PSA_LCDR3 |
| 468 | AAWDDSLSGLYV | Anti-PSA_LCDR3 |
| 469 | QSVLTQPPSASGTPGQRVTLSCSGSNSNIGSNTVNWYQQLPGTNPKLLIYSNNQRPSG | Anti-PSA_V_{L} |
| | VPDRFSGSKSGTSASLAISGLQSEDEADYYCATWDDSLNGPVFGGGTKLTVLG | |
| 470 | QSVLTQPPSVSGAPGQRVTISCTGSSSNFGAGYDVHWYQQLPGAAPKLLIYGDTNRPS | Anti-PSA_V_{L} |
| | GVPDRFSGSKSGTSASLAITGLQAEDEADYYCQSYDTSLSGSVFGGGTKLTVLG | |
| 471 | QSVLTQPPSVSGAPGQRVTISCTGSSSNIGAGYDVHWYQQLPGTAPKLLIYGNSNRPS | Anti-PSA_V_{L} |
| | GVPDRFSGSKSGTSASLAITGLQAEDEADYYCQSYDSSLSGWVFGGGTKLTVLG | |
| 472 | QAVVTQEPSLTVSPGGTVTLTCASSTGAVTSGYYPNWFQLKPGQAPRALIYTTGKKH | Anti-PSA_V_{L} |
| | SWAPARFSGSLLGGKAALTLSGVQPEDEAEYYCLLYSGGVWVFGGGTKLTVLG | |
| 473 | QSVLTQPPSVSAAPGQKVTISCSGSSYNIGNNYVSWYQQLPGTAPKLLIYDNNKRPSGI | Anti-PSA_V_{L} |
| | PDRFSGSKSGTSATLGITGLQTGDEAEYYCGTWESSLSAYVFGTGTKVTVLG | |
| 474 | QSVVTQPPSVSGAPGQRVTISCTGSSSNFGAGYDVHWYQQLPGTAPKLLIYGNSNRPS | Anti-PSA_V_{L} |
| | GVPDRFSGSKSGTSASLAITGLQAEDEADYYCQSYDSSLSGWVFGGGTKLTVLG | |
| 475 | QAVLTQPPSASGTPGQRVTISCSGSSSNIGSNTVNWYQQLPGTAPKLLIYSNNQRPSGV | Anti-PSA_V_{L} |
| | PDRFSGSKSGTSASLAISGLQSEDEADYYCAAWDDSLNGRWVFGGGTKLTVLG | |
| 476 | QSVLTQPPSVSGAPGQRVTISCTGSSSNIGAGYDVHWYQQLPGTAPKLLIYGNSNRPS | Anti-PSA_V_{L} |
| | GVPDRFSGSKSGTSASLAITGLQAEDEADYYCQSYDSSLSEVFGTGTKVTVLG | |
| 477 | QAVVTQEPSLTVSPGGTVTLTCASSTGAVTSGYYPNWFQQKPGQAPRALIYSTSNKHS | Anti-PSA_V_{L} |
| | WTPARFSGSLLGGKAALTLSGVQPEDEAEYYCLLYYGGAYVFGTGTKVTVLG | |
| 478 | QTVVTQEPSLTVSPGGTVTLTCASSTGAVTSGYYPNWFQQKPGQAPRALIYSTSNKHS | Anti-PSA_V_{L} |
| | WTPARFSGSLLGGKAALTLSGVQPEDEAEYYCLLYYGGAQWVFGGGTKLTVLG | |
| 479 | QAVLTQPPSASGTPGQRVTISCSGRSSNLGSNSVNWYQQVPGTAPKLLIFDNHQRPSG | Anti-PSA_V_{L} |
| | VPDRFSGSKSGTSASLAISGLRSEDETDYYCAAWDDSLNSVVFGGGTKLTVLG | |
| 480 | QSVVTQPPSVSAAPGQKVTISCSGSSSNIGNNYVSWYQQLPGTAPKLLIYDNYKRPSGI | Anti-PSA_V_{L} |
| | PDRFSGSKSGTSATLGITGLQTGDEADYYCGTWDSSLSAGVFGGGTKLTVLG | |
| 481 | QSVVTQPPSVSAAPGQRVTISCSGSSSNIGNNYVSWYQQLPGAAPRLLIYDNDKRPSGI | Anti-PSA_V_{L} |
| | PDRFSGSKSGTSATLGITGLQTGDEADYYCGTWDSSLSSGVFGGGTKLTVLG | |
| 482 | DIQLTQSPSSLSASVGDRVTITCRASQSISSYLNWYQQKPGKAPKLLIYAASSLQSGVPS | Anti-PSA_V_{L} |
| | RFSGSGSGTDFTLTISSLQPEDFATYYCQQSYSTPFTFGPGTKVDIKR | |
| 483 | QAVVTQEPSLTVSPGGTVTLTCASSTGTVTSTYYPNWFQQKPGQAPRALIYSTSNRHS | Anti-PSA_V_{L} |
| | WTPARFSGSLLGGKAALTVSGVQPDDEAEYYCLVFYGGVWVFGGGTKLTVLG | |
| 484 | QSALTQPASVSGSPGQSITISCTGTSSDVGGYNYVSWYQQHPGKAPKLMIYDVSKRPS | Anti-PSA_V_{L} |
| | GVSNRFSGSKSGNTASLTISGLQAEDEADYYCSSYTSSSRYVFGTGTKVTVLG | |
| 485 | QAVVTQEPSLTVSPGGTVTLTCASSTGAVTSGYYPNWFQQKPGQAPRPLIYSTNNKHS | Anti-PSA_V_{L} |
| | WTPARFSGSLLGGKAALTLSGVQPEDEAEYYCLLYYGGQGVFGGGTKLTVLG | |
| 486 | LPVLTQPPSASGTPGQRVTISCSGSSSNIGTNYVYWYQQLPGTAPKLLIYSNNQRPSGV | Anti-PSA_V_{L} |
| | PDRFSGSKSGTSASLAISGLRSEDEADYYCAAWDDSLSGLYVFGTGTKVTVLG | |
| 487 | QSVLTQPPSVSGAPGQRVTISCTGSSSNIGAGYDVHWYQQLPGTAPKLLIYGNSNRPS | PSMA-A scFv |
| | GVPDRFSGSKSGTSASLAITGLQAEDEADYYCQSYDSSLSGYVFGTGTKVTVLGSRGG | |
| | GGSGGGGSGGGGSLEMAEVQLVQSGAEVKKPGESLKISCKGSGYSFTSYWIGWVRQ | |
| | MPGKGLEWMGIIYPGDSDTRYSPSFQGQVTISADKSISTAYLQWSSLKASDTAMYYC | |
| | ARSMGSSLYASSDVWGQGTLVTVSS | |
| 488 | QAVLTQPPSASGTPGQRVTISCSGSSSNIGSNTVNWYQQLPGTAPKLLMYSNNQRPSG | PSMA-B scFv |
| | VPDRFSGSKSGTSASLAISGLQSEDEADYYCAAWDDSLNGYVFGTGTKVTVLGSRGG | |
| | GGSGGGGSGGGGSLEMAEVQLVQSGAEMKKPGESLKISCKGSGYNFASYWVGWVR | |
| | QMPGKGLEWMGTIYPDDSDTRYGPAFQGQVTISADKSISTAYLQWSSLKASDTAMY | |
| | YCARDSYYGIDVWGQGTLVTVSS | |
| 489 | KNDAPVVQEPRRLSFRSTIYGSR | ROR1 peptide can be |
| | | targeted by CAR |
| 490 | AANCIRIGIPMADPI | ROR1 peptide can be |
| | | targeted by CAR |
| 491 | SSTGVLFVKFGPPPTASPG | ROR1 peptide can be |
| | | targeted by CAR |
| 492 | SNPMILMRLKLPNCE | ROR1 peptide can be |
| | | targeted by CAR |
| 493 | GGSLSSHGVS | Anti-ROR1_HCDR1 |
| 494 | RIIPMFGVTDYAQKFQD | Anti-ROR1_HCDR2 |
| 495 | ESRGATFEY | Anti-ROR1_HCDR3 |
| 496 | QVQLVQSGTEVKKPGSSVKVSCQASGGSLSSHGVSWLRQAPGQGLEWVGRIIPMFGV | Anti-ROR1_V_{H} |
| | TDYAQKFQDRVTITADKSTSTVYMELISLGSDDTAVYFCARESRGATFEYWGQGTLV | |
| | TVSS | |
| 497 | RASQSVSSSYLA | Anti-ROR1_LCDR1 |
| 498 | GASSRAT | Anti-ROR1_LCDR2 |
| 499 | QQYGSS | Anti-ROR1_LCDR3 |
| 500 | EIVLTQSPGTLSLSPGERATLSCRASQSVSSSYLAWYQQKPGQAPRLLIYGASSRATGIP | Anti-ROR1_V_{L} |
| | DRFSGSGSGTDFTLTISRLEPEDFAVYYCQQYGSSFGPGTKVDIKR | |
| 501 | GGSISSSSYYWG | Anti-ROR1_HCDR1 |
| 502 | SIYYSGSTYYNPSLKS | Anti-ROR1_HCDR2 |
| 503 | HDGTDAFDI | Anti-ROR1_HCDR3 |
| 504 | QLQLQESGPGLVKPSETLSLTCTVSGGSISSSSYYWGWIRQPPGKGLEWIGSIYYSGST | Anti-ROR1_V_{H} |
| | YYNPSLKSRVTISVDTSKNQFSLKLGSVTAADTAVYYCARHDGTDAFDIWGQGTTVT | |
| | VSS | |
| 505 | TGTSSDFGDYDYVS | Anti-ROR1_LCDR1 |
| 506 | DVSDRPS | Anti-ROR1_LCDR2 |
| 507 | SSLTTSSTLV | Anti-ROR1_LCDR3 |
| 508 | QSVLTQPASVSGSPGQSITISCTGTSSDFGDYDYVSWYQQHPGKAPKLMIYDVSDRPS | Anti-ROR1_V_{L} |
| | GVSNRFSGSKSGNTASLTISGLQAEDEADYFCSSLTTSSTLVFGGGTKLTVLG | |
| 509 | QLSLLMWIT | NY-ESO-1 peptide can |
| | | be targeted by CAR |
| 510 | SLLMWITQC | NY-ESO-1 peptide can |
| | | be targeted by CAR |
| 511 | SLLMWITQCFL | NY-ESO-1 peptide can |
| | | be targeted by CAR |
| 512 | SLLMWITQV | NY-ESO-1 peptide can |
| | | be targeted by CAR |
| 513 | ALLMWITQC | NY-ESO-1 peptide can |
| | | be targeted by CAR |
| 514 | SALMWITQC | NY-ESO-1 peptide can |
| | | be targeted by CAR |
| 515 | SLAMWITQC | NY-ESO-1 peptide can |
| | | be targeted by CAR |
| 516 | SLLAWITQC | NY-ESO-1 peptide can |
| | | be targeted by CAR |
| 517 | SLLMAITQC | NY-ESO-1 peptide can |
| | | be targeted by CAR |
| 518 | SLLMWATQC | NY-ESO-1 peptide can |
| | | be targeted by CAR |
| 519 | SLLMWIAQC | NY-ESO-1 peptide can |
| | | be targeted by CAR |
| 520 | GDTFSSYS | Anti-NY-ESO- |
| | | 1_HCDR1 |
| 521 | FIPNLNKG | Anti-NY-ESO- |
| | | 1_HCDR2 |
| 522 | ARDWSYSIDY | Anti-NY-ESO- |
| | | 1_HCDR3 |
| 523 | QVQLVQSGAEVKKPGSSVKVSCKASGDTFSSYSISWVRQAPGQGLEWMGRIIPILGIA | Anti-NY-ESO-1_V_{H} |
| | NYAQKYQGRVTLSADKSTSTSYMELNSLRSEDTAVYYCARDWSYSIDYWGQGTLVT | |
| | VSS | |
| 524 | SSNIGNNY | Anti-NY-ESO- |
| | | 1_LCDR1 |
| 525 | DNN | Anti-NY-ESO- |
| | | 1_LCDR2 |
| 526 | GTWDSSLSAWV | Anti-NY-ESO- |
| | | 1_LCDR3 |
| 527 | QSVVTQPPSVSAAPGQKVTISCSGSSSNIGNNYVSWYQQLPGTAPKLLIYDNNKRPSGI | Anti-NY-ESO-1_V_{L} |
| | PDRFSGSKSGTSATLGITGLQTGDEADYYCGTWDSSLSAWVFGGGTKLTVLG | |
| 528 | GYTFTSYG | Anti-NY-ESO- |
| | | 1_HCDR1 |
| 529 | ISAYNGNT | Anti-NY-ESO- |
| | | 1_HCDR2 |
| 530 | ARYSGYYAGDS | Anti-NY-ESO- |
| | | 1_HCDR3 |
| 531 | QVQLVQSGAEVKKPGASVKVSCKASGYTFTSYGISWVRQAPGQGLEWMGWISAYN | Anti-NY-ESO-1_V_{H} |
| | GNTNYAQKLQGRVTMTTDTSTSTAYMELRSLRSDDTAVYYCARYSGYYAGDSWGQ | |
| | GTLVTVSS | |
| 532 | SSNIGAGYD | Anti-NY-ESO- |
| | | 1_LCDR1 |
| 533 | GDT | Anti-NY-ESO- |
| | | 1_LCDR2 |
| 534 | QSYDSNLYTYV | Anti-NY-ESO- |
| | | 1_LCDR3 |
| 535 | QSVLTQPPSVSGAPGQRVTISCTGSSSNIGAGYDVHWYQQLPGTAPKLLIYGDTNRPS | Anti-NY-ESO-1_V_{L} |
| | GVPDRISGSKSGTSASLAITGLQAEDEADYYCQSYDSNLYTYVFGTGTKVTVLG | |
| 536 | GYTFTSYG | Anti-NY-ESO- |
| | | 1_HCDR1 |
| 537 | FIPNLNKG | Anti-NY-ESO- |
| | | 1_HCDR2 |
| 538 | ARGDYGSDQ | Anti-NY-ESO- |
| | | 1_HCDR3 |
| 539 | EVQLVESGAEVKRPGASVKVSCKASGYTFTSYGISWVRQAPGQGLEWMGRFIPNLNK | Anti-NY-ESO-1_V_{H} |
| | GNSAHKFEGRVSFTADKFTNTAYMELRGLKSDDTAVYYCARGDYGSDQWGQGTLV | |
| | TVSS | |
| 540 | SSNIGAGY | Anti-NY-ESO- |
| | | 1_LCDR1 |
| 541 | GNS | Anti-NY-ESO- |
| | | 1_LCDR2 |
| 542 | QSYDSSLSGSWV | Anti-NY-ESO- |
| | | 1_LCDR3 |
| 543 | QSVLTQPPSVSGAPGQRVTISCTGSSSNIGAGYDVHWYQQLPGTAPKLLIYGNSNRPS | Anti-NY-ESO-1_V_{L} |
| | GVPDRFSGSKSGTSASLAITGLQAEDEADYYCQSYDSSLSGSWVFGGGTKLTVLG | |
| 544 | GGTFSSYA | Anti-NY-ESO- |
| | | 1_HCDR1 |
| 545 | IIPIFGTA | Anti-NY-ESO- |
| | | 1_HCDR2 |
| 546 | ARYDSYVYDE | Anti-NY-ESO- |
| | | 1_HCDR3 |
| 547 | EVQLVQSGAEVKKPGSSVKVSCKASGGTFSSYAISWVRQAPGQGLEWMGGIIPIFGTA | Anti-NY-ESO-1_V_{H} |
| | NYAQKFQGRVTITADESTSTAYMELSSLRSEDTAVYYCARYDSYVYDEWGQGTLVT | |
| | VSS | |
| 548 | GSNIGAGYD | Anti-NY-ESO- |
| | | 1_LCDR1 |
| 549 | GNS | Anti-NY-ESO- |
| | | 1_LCDR2 |
| 550 | QSYDSSLSGWGI | Anti-NY-ESO- |
| | | 1_LCDR3 |
| 551 | QSVVTQPPSLSGAPGQRVTISCNGSGSNIGAGYDVHWYQQLPGTAPKLLIYGNSNRPS | Anti-NY-ESO-1 V_{L} |
| | GVPDRFSGSKSGTSASLAITGLQAEDEADYYCQSYDSSLSGWGIFGGGTKLTVLG | |
| 552 | GYTFTKYG | Anti-NY-ESO- |
| | | 1_HCDR1 |
| 553 | ISADSGKT | Anti-NY-ESO- |
| | | 1_HCDR2 |
| 554 | ARDDDS | Anti-NY-ESO- |
| | | 1_HCDR3 |
| 555 | QVQLVQSGPEVKKPGASMKVSCKASGYTFTKYGISWVRQAPGQGLEWMGWISADS | Anti-NY-ESO-1_V_{H} |
| | GKTSYAQNLQGRVSLTIDTSTATAYMELRSLRSDDTAVYYCARDDDSWGQGTLVTV | |
| | SS | |
| 556 | SSNIGNNY | Anti-NY-ESO- |
| | | 1_LCDR1 |
| 557 | DNN | Anti-NY-ESO- |
| | | 1_LCDR2 |
| 558 | GTWDSSLSAEV | Anti-NY-ESO- |
| | | 1_LCDR3 |
| 559 | QSVLTQPPSVSAAPGQKVTISCSGSSSNIGNNYVSWYQQLPGTAPKLLIYDNNKRPSGI | Anti-NY-ESO-1_V_{L} |
| | PDRFSGSKSGTSATLGITGLQTGDEADYYCGTWDSSLSAEVFGTGTKVTVLG | |
| 560 | GYTLTDLP | Anti-NY-ESO- |
| | | 1_HCDR1 |
| 561 | FDPEDGEI | Anti-NY-ESO- |
| | | 1_HCDR2 |
| 562 | ARYVPYVSYSDS | Anti-NY-ESO- |
| | | 1_HCDR3 |
| 563 | EVQLVQSGAEVKKPGASVKVSCKVSGYTLTDLPMHWVRQAPGKGLEWMGGFDPED | Anti-NY-ESO-1_V_{H} |
| | GEIIYAQKFQGRVTMTEDTFTDTAYVELSSLRSEDTAVYYCARYVPYVSYSDSWGQG | |
| | TLVTVSS | |
| 564 | QSLLHSNGYNY | Anti-NY-ESO- |
| | | 1_LCDR1 |
| 565 | LGS | Anti-NY-ESO- |
| | | 1_LCDR2 |
| 566 | MQALQTPYT | Anti-NY-ESO- |
| | | 1_LCDR3 |
| 567 | DVVMTQSPLSLPVTPGEPASISCRSSQSLLHSNGYNYLDWYLQKPGQSPQLLIYLGSN | Anti-NY-ESO-1_V_{L} |
| | RASGVPDRFSGSGSGTDFTLKISRVEAEDVGVYYCMQALQTPYTFGQGTKLEIKR | |
| 568 | GGTFSSYA | Anti-NY-ESO- |
| | | 1_HCDR1 |
| 569 | IIPIFGTA | Anti-NY-ESO- |
| | | 1_HCDR2 |
| 570 | ARSYWSWTPYDP | Anti-NY-ESO- |
| | | 1_HCDR3 |
| 571 | EVQLVQSGAEVKKPGASVKVSCKASGGTFSSYAISWVRQAPGQGLEWMGGIIPIFGT | Anti-NY-ESO-1_V_{H} |
| | ANYAQKFQGRVTITADKSTSTAYMELSSLRSEDTAVYYCARSYWSWTPYDPWGQGT | |
| | LVTVSS | |
| 572 | NIGSKS | Anti-NY-ESO- |
| | | 1_LCDR1 |
| 573 | YDS | Anti-NY-ESO- |
| | | 1_LCDR2 |
| 574 | QVWDSSSDHYV | Anti-NY-ESO- |
| | | 1_LCDR3 |
| 575 | LPVLTQPPSVSVAPGKTARITCGGNNIGSKSVHWYQQKPGQAPVLVIYYDSDRPSGIPE | Anti-NY-ESO-1_V_{L} |
| | RFSGSNSGNTATLTISRVEAGDEADYYCQVWDSSSDHYVFGTGTKVTVLG | |
| 576 | VLDGLDVLL | PRAME peptide can be |
| | | targeted by CAR |
| 577 | SLYSFPEPEA | PRAME peptide can be |
| | | targeted by CAR |
| 578 | ALYVDSLFFL | PRAME peptide can be |
| | | targeted by CAR |
| 579 | SLLQHLIGL | PRAME peptide can be |
| | | targeted by CAR |
| 580 | NLTHVLYPV | PRAME peptide can be |
| | | targeted by CAR |
| 581 | GGTFSSYA | Anti-PRAME_HCDR1 |
| 582 | IIPILGIA | Anti-PRAME_HCDR2 |
| 583 | ARHYGQWWDY | Anti-PRAMEHCDR3 |
| 584 | QVQLVQSGAEVRKPGASVKVSCKASGGTFSSYAISWVRQAPGQGLEWMGRIIPILGIA | Anti-PRAME_V_{H} |
| | NYAQKFQGRVTITADKSTSTAYMELSSLRSEDTAVYYCARHYGQWWDYWGQGTLV | |
| | TVSS | |
| 585 | SSNIGSNT | Anti-PRAME_LCDR1 |
| 586 | SNN | Anti-PRAME_LCDR2 |
| 587 | AAWDDSLNGSYV | Anti-PRAME_LCDR3 |
| 588 | QAVLTQPPSASGTPGQRVTISCSGSSSNIGSNTVNWYQQLPGTAPKLLIYSNNQRPSGV | Anti-PRAME_V_{L} |
| | PDRFSGSKSGTSASLAISGLQSEDEADYYCAAWDDSLNGSYVFGTGTKVTVLG | |
| 589 | GGTFSSHP | Anti-PRAME_HCDR1 |
| 590 | IIPMLDIP | Anti-PRAME_HCDR2 |
| 591 | ARGLYYYDY | Anti-PRAME_HCDR3 |
| 592 | QVQLVQSGAEVKKPGSSVKVSCKASGGTFSSHPISWVRQAPGQGLEWMGRIIPMLDIP | Anti-PRAME_V_{H} |
| | NNAQKFQGRVTITADKSTDTAYLELSSLTSEDTAVYYCARGLYYYDYWGQGTLVTV | |
| | SS | |
| 593 | TSNIGAGFD | Anti-PRAME_LCDR1 |
| 594 | GNT | Anti-PRAME_LCDR2 |
| 595 | QSYDRSLSTIL | Anti-PRAME_LCDR3 |
| 596 | QSVVTQPPAVSGALGQRVTISCTGTTSNIGAGFDVHWYQQRPGAAPKLLISGNTHRPS | Anti-PRAME_V_{L} |
| | GVPDRISGSKSGTLASLAITGLQAEDEADYYCQSYDRSLSTILFGGGTKLTVLG | |
| 597 | GGTFSSYA | Anti-PRAME_HCDR1 |
| 598 | IIPIFGIA | Anti-PRAME_HCDR2 |
| 599 | ARSMWYMDS | Anti-PRAME_HCDR3 |
| 600 | EVQLVESGAEVKKPGSSVKVSCKASGGTFSSYAISWVRQAPGQGLEWMGRIIPIFGIA | Anti-PRAME_V_{H} |
| | NYAQKFQGRVTITADKSTSTAYMELSSLRSEDTAVYYCARSMWYMDSWGQGTLVT | |
| | VSS | |
| 601 | SSNIGAGFD | Anti-PRAME_LCDR1 |
| 602 | GNS | Anti-PRAME_LCDR2 |
| 603 | QSYDSSLSGYV | Anti-PRAME_LCDR3 |
| 604 | QSVLTQPPSVSGAPGQRVTISCTGSSSNIGAGFDVHWYQQLPGTAPKLLIFGNSNRPSG | Anti-PRAME_V_{L} |
| | VPDRFSGSKSGTSASLAITGLQAEDEADYYCQSYDSSLSGYVFGSGTKVTVLG | |
| 605 | GYTFSSYG | Anti-PRAME_HCDR1 |
| 606 | ISPYNGNT | Anti-PRAME_HCDR2 |
| 607 | ARYSGYYYVDY | Anti-PRAME_HCDR3 |
| 608 | QVQLVQSGAEVKKPGASVKVSCKASGYTFSSYGISWVRQAPGQGLEWMGWISPYNG | Anti-PRAME_V_{H} |
| | NTNYAQNLQGRVTMTTDTSTTTAYMELRSLTSDDTAVYYCARYSGYYYVDYWGQG | |
| | TLVTVSS | |
| 609 | QSISSY | Anti-PRAME_LCDR1 |
| 610 | AAS | Anti-PRAME_LCDR2 |
| 611 | QQSYSTPRT | Anti-PRAME_LCDR3 |
| 612 | DIQLTQSPSSLSASVGDRVTITCRASQSISSYLNWYQQKPGKAPKLLIYAASSLQSGVPS | Anti-PRAME_V_{L} |
| | RFSGSGSGTDFTLTISSLQPEDFATYYCQQSYSTPRTFGQGTKVEIKR | |
| 613 | GGTFSSYA | Anti-PRAME_HCDR1 |
| 614 | IIPILGIA | Anti-PRAME_HCDR2 |
| 615 | ARQGYVWSEMDF | Anti-PRAME_HCDR3 |
| 616 | EVQLVESGAEVKKPGSSVKVSCKASGGTFSSYAISWVRQAPGQGLEWMGRIIPILGIA | Anti-PRAME_V_{H} |
| | NYAQKFQGRVTITADKSTSTAYMELSSLRSEDTAVYYCARQGYVWSEMDFWGQGTL | |
| | VTVSS | |
| 617 | NIGSKS | Anti-PRAME_LCDR1 |
| 618 | YDS | Anti-PRAME_LCDR2 |
| 619 | QVWDSITDHYV | Anti-PRAME_LCDR3 |
| 620 | KLLPVLTIPPSVSVAPGKTARITCGGNNIGSKSVHWYQQKPGQAPVLVIYYDSDRPSG | Anti-PRAME_V_{L} |
| | IPERFSGSNSGNTATLTISRVEAGDEADYYCQVWDSITDHYVFGTGTKVTVLG | |
| 621 | GYTFTSYY | Anti-PRAME_HCDR1 |
| 622 | INPSGGST | Anti-PRAME_HCDR2 |
| 623 | AAGSYYSLDI | Anti-PRAME_HCDR3 |
| 624 | EVQLVESGAEVKKPGASVKVSCKASGYTFTSYYMHWVRQAPGQGLEWMGIINPSGG | Anti-PRAME_V_{H} |
| | STSYAQKFQGRVTMTRDTSTSTVYMELSSLRSEDTAVYYCAAGSYYSLDIWGQGTM | |
| | VTVSS | |
| 625 | SGSIASNF | Anti-PRAME_LCDR1 |
| 626 | DDN | Anti-PRAME_LCDR2 |
| 627 | QSYDGSNVI | Anti-PRAME_LCDR3 |
| 628 | KLLPVLTQPHSVSESPGKTVTISCTGSSGSIASNFVQWYQQRPGSAPTTVIYDDNQRPS | Anti-PRAME_V_{L} |
| | GVPDRFSASIDRSSNSASLTISGLKTDDEADYYCQSYDGSNVIFGGGTKLTVLG | |
| 629 | GYTFSSYY | Anti-PRAME_HCDR1 |
| 630 | INPTSGST | Anti-PRAME_HCDR2 |
| 631 | ARSGGGYGDS | Anti-PRAME_HCDR3 |
| 632 | EVQLVQSGAEVEKPGASVKVSCKASGYTFSSYYMDWVRQAPGQGLEWMGRINPTSG | Anti-PRAME_V_{H} |
| | STTYAQKFQGRVTMTRDTSTFTVYMDLSSLRSEDTAVYYCARSGGGYGDSWGQGTL | |
| | VTVSS | |
| 633 | NFGSQS | Anti-PRAME_LCDR1 |
| 634 | YDQ | Anti-PRAME_LCDR2 |
| 635 | QVWDTYTDHVV | Anti-PRAME_LCDR3 |
| 636 | QPVLTQPPSVSVAPGETASVSCGGNNFGSQSVHWYQQKSGQAPLLVIYYDQDRPSEIP | Anti-PRAME_V_{L} |
| | ARFSGSKSGNTATLTISRVEAGDEADYYCQVWDTYTDHVVFGGGTKLTVLG | |
| 637 | RMFPNAPYL | WT1 peptide can be |
| | | targeted by CAR |
| 638 | GGTFSSYAIS | Anti-WT1_HCDR1 |
| 639 | GIIPIFGTANYAQKFQG | Anti-WT1_HCDR2 |
| 640 | RIPPYYGMDV | Anti-WT1_HCDR3 |
| 641 | QVQLVQSGAEVKKPGSSVKVSCKASGGTFSSYAISWVRQAPGQGLEWMGGIIPIFGTA | Anti-WT1_V_{H} |
| | NYAQKFQGRVTITADESTSTAYMELSSLRSEDTAVYYCARRIPPYYGMDVWGQGTTV | |
| | TVSS | |
| 642 | SGSSSNIGSNYVY | Anti-WT1_LCDR1 |
| 643 | RSNQRPS | Anti-WT1_LCDR2 |
| 644 | AAWDDSLNGVV | Anti-WT1_LCDR3 |
| 645 | QTVVTQPPSASGTPGQRVTISCSGSSSNIGSNYVYWYQQLPGTAPKLLIYRSNQRPSGV | Anti-WT1_V_{L} |
| | PDRFSGSKSGTSASLAISGPRSVDEADYYCAAWDDSLNGVVFGGGTKLTVLG | |
| 646 | QTVVTQPPSASGTPGQRVTISCSGSSSNIGSNYVYWYQQLPGTAPKLLIYRSNQRPSGV | Anti-WT1_scFv |
| | PDRFSGSKSGTSASLAISGPRSVDEADYYCAAWDDSLNGVVFGGGTKLTVLGSRGGG | |
| | GSGGGGSGGGSLEMAQVQLVQSGAEVKKPGSSVKVSCKASGGTFSSYAISWVRQAP | |
| | GQGLEWMGGIIPIFGTANYAQKFQGRVTITADESTSTAYMELSSLRSEDTAVYYCARR | |
| | IPPYYGMDVWGQGTTVTVSS | |
| 647 | GDSVSSNSAAWN | Anti-WT1_HCDR1 |
| 648 | RTYYGSKWYNDYAVSVKS | Anti-WT1_HCDR2 |
| 649 | GRLGDAFDI | Anti-WT1_HCDR3 |
| 650 | QVQLQQSGPGLVKPSQTLSLTCAISGDSVSSNSAAWNWIRQSPSRGLEWLGRTYYGS | Anti-WT1_V_{H} |
| | KWYNDYAVSVKSRITINPDTSKNQFSLQLNSVTPEDTAVYYCARGRLGDAFDIWGQG | |
| | TMVTVSS | |
| 651 | RASQSISSYLN | Anti-WT1_LCDR1 |
| 652 | AASSLQS | Anti-WT1_LCDR2 |
| 653 | QQSYSTPLT | Anti-WT1_LCDR3 |
| 654 | DIQMTQSPSSLSASVGDRVTITCRASQSISSYLNWYQQKPGKAPKLLIYAASSLQSGVP | Anti-WT1_V_{L} |
| | SRFSGSGSGTDFTLTISSLQPEDFATYYCQQSYSTPLTFGGGTKVDIKR | |
| 655 | DIQMTQSPSSLSASVGDRVTITCRASQSISSYLNWYQQKPGKAPKLLIYAASSLQSGVP | Anti-WT1_scFv |
| | SRFSGSGSGTDFTLTISSLQPEDFATYYCQQSYSTPLTFGGGTKVDIKRSRGGGGSGGG | |
| | GSGGGGSLEMAQVQLQQSGPGLVKPSQTLSLTCAISGDSVSSNSAAWNWIRQSPSRG | |
| | LEWLGRTYYGSKWYNDYAVSVKSRITINPDTSKNQFSLQLNSVTPEDTAVYYCARGR | |
| | LGDAFDIWGQGTMVTVSS | |
| 656 | GYSFTNFWIS | Anti-WT1_HCDR1 |
| 657 | RVDPGYSYSTYSPSFQG | Anti-WT1_HCDR2 |
| 658 | VQYSGYYDWFDP | Anti-WT1_HCDR3 |
| 659 | QMQLVQSGAEVKEPGESLRISCKGSGYSFTNFWISWVRQMPGKGLEWMGRVDPGYS | Anti-WT1_V_{H} |
| | YSTYSPSFQGHVTISADKSTSTAYLQWNSLKASDTAMYYCARVQYSGYYDWFDPWG | |
| | QGTLVTVSS | |
| 660 | SGSSSNIGSNTVN | Anti-WT1_LCDR1 |
| 661 | SNNQRPS | Anti-WT1_LCDR2 |
| 662 | AAWDDSLNGWV | Anti-WT1_LCDR3 |
| 663 | QAVVTQPPSASGTPGQRVTISCSGSSSNIGSNTVNWYQQVPGTAPKLLIYSNNQRPSG | Anti-WT1_V_{L} |
| | VPDRFSGSKSGTSASLAISGLQSEDEADYYCAAWDDSLNGWVFGGGTKLTVLG | |
| 664 | QAVVTQPPSASGTPGQRVTISCSGSSSNIGSNTVNWYQQVPGTAPKLLIYSNNQRPSG | Anti-WT1_scFv |
| | VPDRFSGSKSGTSASLAISGLQSEDEADYYCAAWDDSLNGWVFGGGTKLTVLGSRGG | |
| | GGSGGGGSGGGGSLEMAQMQLVQSGAEVKEPGESLRISCKGSGYSFTNFWISWVRQ | |
| | MPGKGLEWMGRVDPGYSYSTYSPSFQGHVTISADKSTSTAYLQWNSLKASDTAMYY | |
| | CARVQYSGYYDWFDPWGQGTLVTVSS | |
| 665 | GYNFSNKWIG | Anti-WT1_HCDR1 |
| 666 | IIYPGYSDITYSPSFQG | Anti-WT1_HCDR2 |
| 667 | HTALAGFDY | Anti-WT1_HCDR3 |
| 668 | QVQLVQSGAEVKKPGESLKISCKGSGYNFSNKWIGWVRQLPGRGLEWIAIIYPGYSDI | Anti-WT1_V_{H} |
| | TYSPSFQGRVTISADTSINTAYLHWHSLKASDTAMYYCVRHTALAGFDYWGLGTLVT | |
| | VSS | |
| 669 | RASQNINKWLA | Anti-WT1_LCDR1 |
| 670 | KASSLES | Anti-WT1_LCDR2 |
| 671 | QQYNSYAT | Anti-WT1_LCDR3 |
| 672 | DIQMTQSPSTLSASVGDRVTITCRASQNINKWLAWYQQRPGKAPQLLIYKASSLESGV | Anti-WT1_V_{L} |
| | PSRFSGSGSGTEYTLTISSLQPDDFATYYCQQYNSYATFGQGTKVEIKR | |
| 673 | DIQMTQSPSTLSASVGDRVTITCRASQNINKWLAWYQQRPGKAPQLLIYKASSLESGV | Anti-WT1_scFv |
| | PSRFSGSGSGTEYTLTISSLQPDDFATYYCQQYNSYATFGQGTKVEIKRSRGGGGSGG | |
| | GGSGGGGSLEMAQVQLVQSGAEVKKPGESLKISCKGSGYNFSNKWIGWVRQLPGRG | |
| | LEWIAIIYPGYSDITYSPSFQGRVTISADTSINTAYLHWHSLKASDTAMYYCVRHTALA | |
| | GFDYWGLGTLVTVSS | |
| 674 | GFTFDDYGMS | Anti-WT1_HCDR1 |
| 675 | GINWNGGSTGYADSVRG | Anti-WT1_HCDR2 |
| 676 | ERGYGYHDPHDY | Anti-WT1_HCDR3 |
| 677 | EVQLVQSGGGVVRPGGSLRLSCAASGFTFDDYGMSWVRQAPGKGLEWVSGINWNG | Anti-WT1_V_{H} |
| | GSTGYADSVRGRFTISRDNAKNSLYLQMNSLRAEDTALYYCARERGYGYHDPHDYW | |
| | GQGTLVTVSS | |
| 678 | GRNNIGSKSVH | Anti-WT1_LCDR1 |
| 679 | DDSDRPS | Anti-WT1_LCDR2 |
| 680 | QVWDSSSDHVV | Anti-WT1_LCDR3 |
| 681 | QSVVTQPPSVSVAPGKTARITCGRNNIGSKSVHWYQQKPGQAPVLVVYDDSDRPSGIP | Anti-WT1_V_{L} |
| | ERFSGSNSGNTATLTISRVEAGDEADYYCQVWDSSSDHVVFGGGTKLTVLG | |
| 682 | QSVVTQPPSVSVAPGKTARITCGRNNIGSKSVHWYQQKPGQAPVLVVYDDSDRPSGIP | Anti-WT1_scFv |
| | ERFSGSNSGNTATLTISRVEAGDEADYYCQVWDSSSDHVVFGGGTKLTVLGSRGGGG | |
| | SGGGGSGGSLEMAEVQLVQSGGGVVRPGGSLRLSCAASGFTFDDYGMSWVRQAPGK | |
| | GLEWVSGINWNGGSTGYADSVRGRFTISRDNAKNSLYLQMNSLRAEDTALYYCARE | |
| | RGYGYHDPHDYWGQGTLVTVSS | |
| 683 | GFSVSGTYMG | Anti-WT1_HCDR1 |
| 684 | LLYSGGGTYHPASLQG | Anti-WT1_HCDR2 |
| 685 | GGAGGGHFDS | Anti-WT1_HCDR3 |
| 686 | EVQLVETGGGLLQPGGSLRLSCAASGFSVSGTYMGWVRQAPGKGLEWVALLYSGGG | Anti-WT1_V_{H} |
| | TYHPASLQGRFIVSRDSSKNMVYLQMNSLKAEDTAVYYCAKGGAGGGHFDSWGQG | |
| | TLVTVSS | |
| 687 | TGSSSNIGAGYDVH | Anti-WT1_LCDR1 |
| 688 | GNSNRPS | Anti-WT1_LCDR2 |
| 689 | AAWDDSLNGYV | Anti-WT1_LCDR3 |
| 690 | QSVLTQPPSVSGAPGQRVTISCTGSSSNIGAGYDVHWYQQLPGTAPKLLIYGNSNRPS | Anti-WT1_V_{L} |
| | GVPDRFSGSKSGTSASLAISGLQSEDEADYYCAAWDDSLNGYVFGTGTKLTVLG | |
| 691 | QSVLTQPPSVSGAPGQRVTISCTGSSSNIGAGYDVHWYQQLPGTAPKLLIYGNSNRPS | Anti-WT1_scFv |
| | GVPDRFSGSKSGTSASLAISGLQSEDEADYYCAAWDDSLNGYVFGTGTKLTVLGSRG | |
| | GGGSGGGGSGGGGSLEMAEVQLVETGGGLLQPGGSLRLSCAASGFSVSGTYMGWVR | |
| | QAPGKGLEWVALLYSGGGTYHPASLQGRFIVSRDSSKNMVYLQMNSLKAEDTAVYY | |
| | CAKGGAGGGHFDSWGQGTLVTVSS | |
| 692 | RKSAPSTGGV | Histone H3.3 peptide |
| | | can be targeted by |
| | | CAR |
| 693 | RKSAPATGGV | Histone H3.3 peptide |
| | | can be targeted by |
| | | CAR |
| 694 | RMSAPSTGGV | Histone H3.3 peptide |
| | | can be targeted by |
| | | CAR |
| 695 | RMSAPATGGV | Histone H3.3 peptide |
| | | can be targeted by |
| | | CAR |
| 696 | AMSAPSTGGV | Histone H3.3 peptide |
| | | can be targeted by |
| | | CAR |
| 697 | RASAPSTGGV | Histone H3.3 peptide |
| | | can be targeted by |
| | | CAR |
| 698 | RMAAPSTGGV | Histone H3.3 peptide |
| | | can be targeted by |
| | | CAR |
| 699 | RMSAASTGGV | Histone H3.3 peptide |
| | | can be targeted by |
| | | CAR |
| 700 | RMSAPSAGGV | Histone H3.3 peptide |
| | | can be targeted by |
| | | CAR |
| 701 | RMSAPSTAGV | Histone H3.3 peptide |
| | | can be targeted by |
| | | CAR |
| 702 | RMSAPSTGAV | Histone H3.3 peptide |
| | | can be targeted by |
| | | CAR |
| 703 | RMSAPSTGGA | Histone H3.3 peptide |
| | | can be targeted by |
| | | CAR |
| 704 | AMSAPATGGV | Histone H3.3 peptide |
| | | can be targeted by |
| | | CAR |
| 705 | RASAPATGGV | Histone H3.3 peptide |
| | | can be targeted by |
| | | CAR |
| 706 | RMAAPATGGV | Histone H3.3 peptide |
| | | can be targeted by |
| | | CAR |
| 707 | RMSAAATGGV | Histone H3.3 peptide |
| | | can be targeted by |
| | | CAR |
| 708 | RMSAPAAGGV | Histone H3.3 peptide |
| | | can be targeted by |
| | | CAR |
| 709 | RMSAPATAGV | Histone H3.3 peptide |
| | | can be targeted by |
| | | CAR |
| 710 | RMSAPATGAV | Histone H3.3 peptide |
| | | can be targeted by |
| | | CAR |
| 711 | RMSAPATGGA | Histone H3.3 peptide |
| | | can be targeted by |
| | | CAR |
| 712 | GYSFTSYW | Anti-Histone |
| | | H3.3_HCDR1 |
| 713 | IYPGDSDT | Anti-Histone |
| | | H3.3_HCDR2 |
| 714 | ARGYDG | Anti-Histone |
| | | H3.3_HCDR3 |
| 715 | EVQLVQSGAEVKKPGESLKISCKGSGYSFTSYWIGWVRQMPGKGLEWMGIIYPGDSD | Anti-Histone H3.3_V_{H} |
| | TRYSPSFQGQVTISADKSISTAYLQWSSLKASDTAMYYCARGYDGWGQGTLVTVSS | |
| 716 | QSLVYSNGNTY | Anti-Histone |
| | | H3.3_LCDR1 |
| 717 | EVS | Anti-Histone |
| | | H3.3_LCDR2 |
| 718 | MQGTHWPPT | Anti-Histone |
| | | H3.3_LCDR3 |
| 719 | DVVMTQSPLSLPVTLGQPASISCRSSQSLVYSNGNTYLNWFHQRPGQSPRRLIYEVSN | Anti-Histone H3.3_V_{L} |
| | RDSGVPDRFSGSGSGTDFTLKISRVEAEDVGVYYCMQGTHWPPTFGGGTKLEIKR | |
| 720 | GYSFTSYW | Anti-Histone |
| | | H3.3_HCDR1 |
| 721 | IYPGDSDT | Anti-Histone |
| | | H3.3_HCDR2 |
| 722 | ARGFDN | Anti-Histone |
| | | H3.3_HCDR3 |
| 723 | EVQLVQSGAEVKKPGESLKISCKGSGYSFTSYWIGWVRQMPGKGLEWMGIIYPGDSD | Anti-Histone H3.3_V_{H} |
| | TRYSPSFQGQVTISADKSISTAYLQWSSLKASDTAMYYCARGFDNWGQGTLVTVSS | |
| 724 | QSLVYSNGNTY | Anti-Histone |
| | | H3.3_LCDR1 |
| 725 | KVS | Anti-Histone |
| | | H3.3_LCDR2 |
| 726 | MQGTYWPYT | Anti-Histone |
| | | H3.3_LCDR3 |
| 727 | EIVLTQSPLSLPVTLGQPASISCRSSQSLVYSNGNTYLSWFHQRPGQSPRRLIYKVSKRD | Anti-Histone H3.3_V_{L} |
| | SGVPDRFSGSGSGTDFTLKISRVEAEDVGVFYCMQGTYWPYTFGQGTKLEIKR | |
| 728 | GYSFTSYW | Anti-Histone |
| | | H3.3_HCDR1 |
| 729 | IYPGDSDT | Anti-Histone |
| | | H3.3_HCDR2 |
| 730 | ARGYDV | Anti-Histone |
| | | H3.3_HCDR3 |
| 731 | EVQLVQSGAEVKKPGESLKISCKGSGYSFTSYWIGWVRQMPGKGLEWMGIIYPGDSD | Anti-Histone H3.3_V_{H} |
| | TRYSPSFQGQVTISADKSISTAYLQWSSLKASDTAMYYCARGYDVWGQGTLVTVSS | |
| 732 | QSLIYSNGNTY | Anti-Histone |
| | | H3.3_LCDR1 |
| 733 | KVS | Anti-Histone |
| | | H3.3_LCDR2 |
| 734 | MQGTHWPPT | Anti-Histone |
| | | H3.3_LCDR3 |
| 735 | DVVMTQSPLSLPVTLGQPASISCRSSQSLIYSNGNTYLTWFHQRPGQPPRRLIHKVSNR | Anti-Histone H3.3_V_{L} |
| | DSGVPDRFSGSGSGSDFTLKISRVEAEDVGIYYCMQGTHWPPTFGGGTKLEIKR | |
| 736 | GYSFTSYW | Anti-Histone |
| | | H3.3_HCDR1 |
| 737 | IYPGDSDT | Anti-Histone |
| | | H3.3_HCDR2 |
| 738 | ARGYDS | Anti-Histone |
| | | H3.3_HCDR3 |
| 739 | EVQLVQSGAEVKKPGESLKISCKGSGYSFTSYWIGWVRQMPGKGLEWMGIIYPGDSD | Anti-Histone H3.3_V_{H} |
| | TRYSPSFQGQVTISADKSISTAYLQWSSLKASDTAMYYCARGYDSWGQGTLVTVSS | |
| 740 | QSLIYSNGNTY | Anti-Histone |
| | | H3.3_LCDR1 |
| 741 | KVS | Anti-Histone |
| | | H3.3_LCDR2 |
| 742 | MQGTHWPPT | Anti-Histone |
| | | H3.3_LCDR3 |
| 743 | DVVMTQSPLSLPVTLGQPASISCRSSQSLIYSNGNTYLTWFHQRPGQPPRRLIHKVSNR | Anti-Histone H3.3_V_{L} |
| | DSGVPDRFSGSGSGSDFTLKISRVEAEDVGIYYCMQGTHWPPTFGGGTKLEIKR | |
| 744 | GLTFDRYA | Anti-Histone |
| | | H3.3_HCDR1 |
| 745 | ITGDGYYT | Anti-Histone |
| | | H3.3_HCDR2 |
| 746 | ARLSGIGRSSYDG | Anti-Histone |
| | | H3.3_HCDR3 |
| 747 | EVQLVESGGGLVQPGGSLRLSCAASGLTFDRYAMSWVRQAAGKGLERFSAITGDGY | Anti-Histone H3.3_V_{H} |
| | YTYYADSVKGRFTISRDNSKNTLYLQMNSLGAEDTAVYYCARLSGIGRSSYDGWGQ | |
| | GTLVTVSS | |
| 748 | SGINVGTYR | Anti-Histone |
| | | H3.3_LCDR1 |
| 749 | YKSDSDK | Anti-Histone |
| | | H3.3_LCDR2 |
| 750 | MIWHSSA | Anti-Histone |
| | | H3.3_LCDR3 |
| 751 | QAVLTQPSSLSASPGASASLTCTLRSGINVGTYRIYWYQQKPGSPPQYLLRYKSDSDK | Anti-Histone H3.3_V_{L} |
| | QQGSGVPSRFSGSKDASANAGILLISGLQSEDEADYYCMIWHSSAWVFGGGTKLTVL | |
| | G | |
| 752 | GYTFTSYT | Anti-Histone |
| | | H3.3_HCDR1 |
| 753 | ISPYNGNT | Anti-Histone |
| | | H3.3_HCDR2 |
| 754 | ARSWEHGFPYDE | Anti-Histone |
| | | H3.3_HCDR3 |
| 755 | QVQLVESGAEVKKPGASVKVSCKASGYTFTSYTITWVRQAPGQGLEWMGWISPYNG | Anti-Histone H3.3_V_{H} |
| | NTNYAQNLQGRVTMTTDTSTTTAYMELRSLTSDDTAVYYCARSWEHGFPYDEWGQ | |
| | GTLVTVSS | |
| 756 | SSNLGAGYD | Anti-Histone |
| | | H3.3_LCDR1 |
| 757 | ISPYNGNT | Anti-Histone |
| | | H3.3_LCDR2 |
| 758 | QSYDSSLSASV | Anti-Histone |
| | | H3.3_LCDR3 |
| 759 | QSVLTQPPSVSGAPGQRVTISCTGSSSNLGAGYDVHWYQQLPGTAPKVLVYFNNNRP | Anti-Histone H3.3_V_{L} |
| | SGVPDRFSGSKSGTSASLAITGLQAEDEADYYCQSYDSSLSASVFGTGTKVTVLG | |
| 760 | AGTFNRYS | Anti-Histone |
| | | H3.3_HCDR1 |
| 761 | IIPIIGVA | Anti-Histone |
| | | H3.3_HCDR2 |
| 762 | ARQEYSYAMDY | Anti-Histone |
| | | H3.3_HCDR3 |
| 763 | EVQLVQSGAEVRKPGSSVKVSCKASAGTFNRYSLSWVRQAPGQGLEWVGRIIPIIGVA | Anti-Histone H3.3_V_{H} |
| | DYAQKFQGRVTITADKSATTAYMELHSLRSEDTAVYYCARQEYSYAMDYWGQGTL | |
| | VTVSS | |
| 764 | SSNIGAGYD | Anti-Histone |
| | | H3.3_LCDR1 |
| 765 | GNN | Anti-Histone |
| | | H3.3_LCDR2 |
| 766 | QSYDTSLTPV | Anti-Histone |
| | | H3.3_LCDR3 |
| 767 | QSVLTQPPSVSGAPGQRVTIFCTGSSSNIGAGYDVHWYQQLPGTAPKLLIYGNNRPS | Anti-Histone H3.3_V_{L} |
| | GVPDRFSGSKSGTSASLAITGLQAEDEADYYCQSYDTSLTPVFGGGTKLTVLG | |
| 768 | GGTFSSYA | Anti-Histone |
| | | H3.3_HCDR1 |
| 769 | IIPIFGTA | Anti-Histone |
| | | H3.3_HCDR2 |
| 770 | ARSYWTFEYSEDS | Anti-Histone |
| | | H3.3_HCDR3 |
| 771 | QVQLVQSGAEVKKPGSSVKVSCKASGGTFSSYAISWVRQAPGQGLEWMGGIIPIFGTA | Anti-Histone H3.3_V_{H} |
| | NYAQKFQGRVTITADESTSTAYMELSSLRSEDTAVYYCARSYWTFEYSEDSWGQGTL | |
| | VTVSS | |
| 772 | SLNLGAGYD | Anti-Histone |
| | | H3.3_LCDR1 |
| 773 | ANT | Anti-Histone |
| | | H3.3_LCDR2 |
| 774 | QSYDNSLSGYV | Anti-Histone |
| | | H3.3_LCDR3 |
| 775 | QSVLTQPPSVSGAPGQRVTISCTGSSLNLGAGYDVHWYQQFPGTAPKLLIFANTNRPS | Anti-Histone H3.3_V_{L} |
| | GVPDRFSASKSGTSASLAITGLQAEDEADYFCQSYDNSLSGYVFGTGTKVTVLG | |
| 776 | GYTFTSYG | Anti-Histone |
| | | H3.3_HCDR1 |
| 777 | ISAYNGNT | Anti-Histone |
| | | H3.3_HCDR2 |
| 778 | ARYYESGYPFDW | Anti-Histone |
| | | H3.3_HCDR3 |
| 779 | EVQLVQSGAEVKKPGASVKVSCKASGYTFTSYGISWVRQAPGQGLEWMGWISAYNG | Anti-Histone H3.3_V_{H} |
| | NTNYAQKLQGRVTMTTDTSTSTAYMELRSLRSDDTAVYYCARYYESGYPFDWWGQ | |
| | GTLVTVSS | |
| 780 | TFNIGSNT | Anti-Histone |
| | | H3.3_LCDR1 |
| 781 | SNN | Anti-Histone |
| | | H3.3_LCDR2 |
| 782 | AAWDDSLSGHVV | Anti-Histone |
| | | H3.3_LCDR3 |
| 783 | SYVLTQPPSASGTPGQRVTISCSGSTFNIGSNTVNWYQQLPATAPKLLIYSNNQRPSGV | Anti-Histone H3.3_V_{L} |
| | PDRFSGSKSGTSASLAISGLQSEDAAAYYCAAWDDSLSGHVVFGGGTKLTVLG | |
| 784 | GYTFTGYY | Anti-Histone |
| | | H3.3_HCDR1 |
| 785 | FDPEDGET | Anti-Histone |
| | | H3.3_HCDR2 |
| 786 | ARSSWWSPVTYYDI | Anti-Histone |
| | | H3.3_HCDR3 |
| 787 | EVQLVQSGAEVKKPGASVKVSCKASGYTFTGYYMHWVRQAPGKGLEWMGGFDPED | Anti-Histone H3.3_V_{H} |
| | GETIYAQKFQGRVTMTEDTSTDTAYMELSSLRSEDTAVYYCARSSWWSPVTYYDIW | |
| | GQGTLVTVSS | |
| 788 | SLRSYY | Anti-Histone |
| | | H3.3_LCDR1 |
| 789 | AKS | Anti-Histone |
| | | H3.3_LCDR2 |
| 790 | NSRDSSGNR | Anti-Histone |
| | | H3.3_LCDR3 |
| 791 | SSELTQDPAVSVALGQTVRITCQGDSLRSYYANWYQQKPGQAPVLVIYAKSNRPSGIA | Anti-Histone H3.3_V_{L} |
| | DRFSGSSSGNTASLTITGAQAEDEADYYCNSRDSSGNRWVFGGGTKVTVLG | |
| 792 | GYTVTSYG | Anti-Histone |
| | | H3.3_HCDR1 |
| 793 | ISAYNGDT | Anti-Histone |
| | | H3.3_HCDR2 |
| 794 | ARSSLPFGVVPNAFDI | Anti-Histone |
| | | H3.3_HCDR3 |
| 795 | QMQLVQSGAEVKKPGASMKVSCKASGYTVTSYGLSWVRQAPGQGLEWVGWISAYN | Anti-Histone H3.3_V_{H} |
| | GDTIYAQKLQGRVTMTTDTSTSTAYMELRSLRSDDTAMYYCARSSLPFGVVPNAFDI | |
| | WGQGTMVTVSS | |
| 796 | SSNIGSNT | Anti-Histone |
| | | H3.3_LCDR1 |
| 797 | SNN | Anti-Histone |
| | | H3.3_LCDR2 |
| 798 | AAWDDSLNGYV | Anti-Histone |
| | | H3.3_LCDR3 |
| 799 | SYVLTQPPSASGTPGQRVTISCSGSSSNIGSNTVNWYQQLPGTAPKLLIYSNNQRPSGV | Anti-Histone H3.3_V_{L} |
| | PDRFSGSKSGTSASLAISGLQSEDEADYYCAAWDDSLNGYVFGTGTKVTVLG | |
| 800 | GYTFTDYY | Anti-Histone |
| | | H3.3_HCDR1 |
| 801 | INPHSGGT | Anti-Histone |
| | | H3.3_HCDR2 |
| 802 | AREDYSGSGSSDA | Anti-Histone |
| | | H3.3_HCDR3 |
| 803 | QMQLVQSGAEVKTTGASVRVSCKASGYTFTDYYLHWVRQAPGQGLEWMGWINPHS | Anti-Histone H3.3_V_{H} |
| | GGTNYAQKFQGRVTMTRDTSISTAYMELSSLRSDDTAVYYCAREDYSGSGSSDAWG | |
| | QGTLVTVSS | |
| 804 | NIGSKS | Anti-Histone |
| | | H3.3_LCDR1 |
| 805 | YDN | Anti-Histone |
| | | H3.3_LCDR2 |
| 806 | QVWNSSSDHYV | Anti-Histone |
| | | H3.3_LCDR3 |
| 807 | SYELTQPPSVSVAPGKTARITCGGNNIGSKSVNWYQQKPGQAPVLVIYYDNDRPSGIP | Anti-Histone H3.3_V_{L} |
| | ERFSGSNSGNTATLTISRVEAGDEADYYCQVWNSSSDHYVFGTGTKVTVLG | |
| 808 | NNNYYWT | Anti-MSLN_HCDR1 |
| 809 | YIYYSGSTFYNPSLKS | Anti-MSLN_HCDR2 |
| 810 | EDTMTGLDV | Anti-MSLN_HCDR3 |
| 811 | QVQLQESGPGLVKPSQTLSLTCTVSGGSINNNNYYWTWIRQHPGKGLEWIGYIYYSGS | Anti-MSLN_V_{H} |
| | TFYNPSLKSRVTISVDTSKTQFSLKLSSVTAADTAVYYCAREDTMTGLDVWGQGTTV | |
| | TVSS | |
| 812 | RASQSINNYLN | Anti-MSLN_LCDR1 |
| 813 | AASSLQS | Anti-MSLN_LCDR2 |
| 814 | QQTYSNPT | Anti-MSLN_LCDR3 |
| 815 | DIQMTQSPSSLSASVGDRVTITCRASQSINNYLNWYQQKPGKAPTLLIYAASSLQSGVP | Anti-MSLN_V_{L} |
| | SRFSGSRSGTDFTLTISSLQPEDFAAYFCQQTYSNPTFGQGTKVEVK | |
| 816 | KTITATGVLFVRLGP | ROR2 epitope |
| 817 | GYRFSKYW | Anti-ROR2_HCDR1 |
| 818 | IYPGDSDT | Anti-ROR2_HCDR2 |
| 819 | ARSFSSFIYDY | Anti-ROR2_HCDR3 |
| 820 | EVQLVQSGAEVKKPGESLKISCQGSGYRFSKYWIGWVRQMPGKGLEWMGIIYPGDSD | Anti-ROR2_V_{H} |
| | TRYSPSFQGQVTISADKSISTAYLQWSSLKASDTAMYYCARSFSSFIYDYWGQGTLVT | |
| | VSS | |
| 821 | GYSFSNYW | Anti-ROR2_HCDR1 |
| 822 | IYPDDSDT | Anti-ROR2_HCDR2 |
| 823 | VRPRGAFDI | Anti-ROR2_HCDR3 |
| 824 | QVQLVESGAEVKKPGESLKISCKASGYSFSNYWIGWVRQMPGKGLEWMGIIYPDDSD | Anti-ROR2_V_{H} |
| | TRYSPSFQGQVTISADKSISTAYLQWYSLKVADTAKYYCVRPRGAFDIWGQGTTVTV | |
| | SS | |
| 825 | GGSISSGGYY | Anti-ROR2_HCDR1 |
| 826 | IYYSGST | Anti-ROR2_HCDR2 |
| 827 | ARGGLYWTYSQDV | Anti-ROR2_HCDR3 |
| 828 | EVQLVESGPGLVKPSQTLSLTCTVSGGSISSGGYYWSWIRQHPGKGLEWIGYIYYSGS | Anti-ROR2_V_{H} |
| | TYYNPSLKSRVTISVDTSKNQFSLKLSSVTAADTAMYYCARGGLYWTYSQDVWGQG | |
| | TLVTVSS | |
| 829 | GFSLSTSGMS | Anti-ROR2_HCDR1 |
| 830 | EDWDDDK | Anti-ROR2_HCDR2 |
| 831 | ARGFYLAYGSYDS | Anti-ROR2_HCDR3 |
| 832 | QITLKESGPELVKPTQTLTLTCTFSGFSLSTSGMSVSWIRQPPGKALEWLARIDWDDD | Anti-ROR2_V_{H} |
| | KYYSTSLKTRLTISKDTSKNQVVLTMTNTDPVDTATYYCARGFYLAYGSYDSWGQG | |
| | TLVTVSS | |
| 833 | GYTFTNYY | Anti-ROR2_HCDR1 |
| 834 | INPTSGRT | Anti-ROR2_HCDR2 |
| 835 | ARSGYYWGVNGDQ | Anti-ROR2 HCDR3 |
| 836 | EVQLVQSGAEVKKPGASVKVSCKASGYTFTNYYIHWVRQAPGQGLEWMGIINPTSG | Anti-ROR2_V_{H} |
| | RTRYAQRFQGRVTMTRDTSTNTVYMDLSSLRSEDTAMYYCARSGYYWGVNGDQW | |
| | GQGTLVTVSS | |
| 837 | QSVSSN | Anti-ROR2_LCDR1 |
| 838 | GAS | Anti-ROR2_LCDR2 |
| 839 | QQYGRSPLT | Anti-ROR2_LCDR3 |
| 840 | ETTLTQSPGTLSVSPGERATLSCRASQSVSSNLAWYQQKRGQAPRLLIYGASTRATGIP | Anti-ROR2_V_{L} |
| | VRFSGSGSGTEFTLTISRLEPEDFAVYYCQQYGRSPLTFGGGTKVDIKR | |
| 841 | SSNIGAGHA | Anti-ROR2_LCDR1 |
| 842 | DNA | Anti-ROR2_LCDR2 |
| 843 | GTWDDSPSAYV | Anti-ROR2_LCDR3 |
| 844 | QSVLTQPPSVSGAPGQRVTISCTGSSSNIGAGHAVHWYQQLPGTAPKLLIYDNANRPS | Anti-ROR2_V_{L} |
| | GVPDRFSGSQSGTSASLAITGLQTGDEADYYCGTWDDSPSAYVFGTGTKVTVLG | |
| 845 | SSNIGSDY | Anti-ROR2_LCDR1 |
| 846 | RND | Anti-ROR2_LCDR2 |
| 847 | VAWDDSLSGYV | Anti-ROR2_LCDR3 |
| 848 | QPVLTQPPSASGTPGQRVTISCSGSSSNIGSDYVSWYQQLPGTAPKLLIYRNDQRPSGV | Anti-ROR2_V_{L} |
| | PDRFSGSKSGTSASLAISGLRSEDEADYYCVAWDDSLSGYVFGSGTKVTVLG | |
| 849 | SGDVGGYNY | Anti-ROR2_LCDR1 |
| 850 | DVN | Anti-ROR2_LCDR2 |
| 851 | SSYTSTSTV | Anti-ROR2_LCDR3 |
| 852 | QSALTQPASVSGSPGQSITISCTGTSGDVGGYNYVSWYQHHPGKAPKLIIYDVNKRPS | Anti-ROR2_V_{L} |
| | GFSDRFSGSKSGNTASLTISGLQAEDEADYYCSSYTSTSTVFGGGTKLTVLG | |
| 853 | NIGSKN | Anti-ROR2_LCDR1 |
| 854 | RDS | Anti-ROR2_LCDR2 |
| 855 | QVWDSSIVV | Anti-ROR2_LCDR3 |
| 856 | SYELTQPLSVSVALGQTARITCGGNNIGSKNVHWYQQKPGQAPVLVIYRDSNRPSGIP | Anti-ROR2_V_{L} |
| | ERFSGSNSGNTATLTISRAQAGDEADYYCQVWDSSIVVFGGGTKLTVLG | |
| 857 | GFTFSSYA | Anti-HER2_HCDR1 |
| 858 | ISGSGYST | Anti-HER2_HCDR2 |
| 859 | AKGFQYGSGSYYTHFDY | Anti-HER2_HCDR3 |
| 860 | EVQLLESGGGLVQPGGSLRLSCAASGFTFSSYAMTWVRQAPGKGLEWVSAISGSGYS | Anti-HER2_V_{H} |
| | TYYADSEKGRFTISRDNSKNTLYLQMNSLRAEDTAVYYCAKGFQYGSGSYYTHFDY | |
| | WGQGTLVTVSS | |
| 861 | QGISSW | Anti-HER2_LCDR1 |
| 862 | AAS | Anti-HER2_LCDR2 |
| 863 | QQYNSYPYT | Anti-HER2_LCDR3 |
| 864 | DIQMTQSPSSLSASVGDRVTITCRASQGISSWLAWYQQKPEKAPKSLIYAASSLQSGVP | Anti-HER2_V_{L} |
| | SRFSGSGSGTDFTLTISSLQPEDFATYYCQQYNSYPYTFGQGTKLEIK | |
| 865 | MKYLLPTAAAGLLLLAAQPAMAQVQLVQSGGGLVQPGRSLRLSCAASGFTFDDYAM | Anti-HER3_scFv |
| | HWVRQAPGKGLEWVSGISWNSGSIGYADSVKGRFTISRDNAKNSLYLQMNSLRPEDT | |
| | AVYYCARDLGAKQWLEGFDYWGQGTLVTVSSGGGGSGGGGSGGGGSNFMLTQDPA | |
| | VSVALGQTVRITCQGDSLRSYYASWYQQKPGQAPVLVIYGKNNRPSGIPDRFSGSTSG | |
| | NSASLTITGAQAEDEADYYCNSRDSSGNHWVFGGGTKVTVLGAAAEQKLISEEDLNG | |
| | AAHHHHHH | |
| 866 | GYAFTNYW | Anti-EpCAM_HCDR1 |
| 867 | IFPGSGNI | Anti-EpCAM_HCDR2 |
| 868 | ARLRNWDEPMDY | Anti-EpCAM_HCDR3 |
| 869 | EVQLLEQSGAELVRPGTSVKISCKASGYAFTNYWLGWVKQRPGHGLEWIGDIFPGSG | Anti-EPCAM_V_{H} |
| | NIHYNEKFKGKATLTADKSSSTAYMQLSSLTFEDSAVYFCARLRNWDEPMDYWGQG | |
| | TTVTVSS | |
| 870 | QSLLNSGNQKNY | Anti-EpCAM_LCDR1 |
| 871 | WAS | Anti-EpCAM_LCDR2 |
| 872 | QNDYSYPLT | Anti-EpCAM_LCDR3 |
| 873 | ELVMTQSPSSLTVTAGEKVTMSCKSSQSLLNSGNQKNYLTWYQQKPGQPPKLLIYWAA | Anti-EPCAM_V_{L} |
| | STRESGVPDRFTGSGSGTDFTLTISSVQAEDLAVYYCQNDYSYPLTFGAGTKLEIK | |
| 874 | GYIFTSYD | Anti-MUC1_HCDR1 |
| 875 | IFPGEGST | Anti-MUC1_HCDR2 |
| 876 | ARGDYYRRYFDL | Anti-MUC1_HCDR3 |
| 877 | QVKLQQSGTEVVKPGASVKLSCKASGYIFTSYDIDWVRQTPEQGLEWIGWIFPGEGST | Anti-MUC1_V_{H} |
| | EYNEKFKGRATLSVDKSSSTAYMELTRLTSEDSAVYFCARGDYYRRYFDLWGQGTT | |
| | VTVSS | |
| 878 | ASSSIRY | Anti-MUC1_LCDR1 |
| 879 | DTS | Anti-MUC1_LCDR2 |
| 880 | QEWSGYPYT | Anti-MUC1_LCDR3 |
| 881 | DIELTQSPALMSASPGERVTMTCSASSSIRYIYWYQQKPGSSPRLLIYDTSNVAPGVPFR | Anti-MUC1_V_{L} |
| | FSGSGSGTSYSLTINRMEAEDAATYYCQEWSGYPYTFGGGTKLELKRAAA | |
| 882 | GGSFSGYY | Anti-MUC16_HCDR1 |
| 883 | INHSGST | Anti-MUC16_HCDR2 |
| 884 | ARQSYITDS | Anti-MUC16_HCDR3 |
| 885 | QVQLQQWGAGLLKPSETLSLTCAVYGGSFSGYYWSWIRQPPGKGLEWIGEINHSGST | Anti-MUC16_V_{H} |
| | NYNPSLKSRVTISVDTSKNQFSLKLSSVTAADTAVYYCARQSYITDSWGQGTLVTVSS | |
| 886 | GGSFSGYY | Anti-MUC16_HCDR1 |
| 887 | INHSGST | Anti-MUC16_HCDR2 |
| 888 | RGSIASAY | Anti-MUC16_HCDR3 |
| 889 | QVQLQQWGAGLLKPSETLSLTCAVYGGSFSGYYWSWIRQPPGKGLEWIGEINHSGST | Anti-MUC16_V_{H} |
| | NYNPSLKSRIIMSVDTSKRQFSLKLRSATAADTAVYYCARWSPFSYKQMYDYWGQG | |
| | TLVTVSS | |
| 890 | QDVSKW | Anti-MUC16_LCDR1 |
| 891 | AAS | Anti-MUC16_LCDR2 |
| 892 | QQANSFPWT | Anti-MUC16_LCDR3 |
| 893 | DIQLTQSPSAVSASVGDRVTITCRASQDVSKWLAWYQQKPGKAPRLLISAASGLQSW | Anti-MUC16_V_{L} |
| | VPSRFSGSGSGTEFTLSISSLQPEDFATYYCQQANSFPWTFGQGTKVEIKR | |
| 894 | RGSIASAY | Anti-MUC16_LCDR1 |
| 895 | EDY | Anti-MUC16_LCDR2 |
| 896 | QSYDDNDHVI | Anti-MUC16_LCDR3 |
| 897 | NFMLTQPHSVSESPGKTVTISCTRSRGSIASAYVQWYQQRPGSAPITVIYEDYERPSEIP | Anti-MUC16_V_{L} |
| | DRFSGSIDSSSNSASLTISGLKTEDEADYYCQSYDDNDHVIFGGGTKVTVLG | |
| 898 | GFTFSSYA | Anti-MUC16_HCDR1 |
| 899 | ISSAGGYI | Anti-MUC16_HCDR2 |
| 900 | ARQGFGNYGDYYAMDY | Anti-MUC16_HCDR3 |
| 901 | EVKLQESGGGFVKPGGSLRVSCAASGFTFSSYAMSWVRLAPEMRLEWVATISSAGGY | Anti-MUC16_V_{H} |
| | IFYSDSVQGRFTISRDNAKNSLHLQMGSLRSGDTAMYYCARQGFGNYGDYYAMDY | |
| | WGQGTTVTVSS | |
| 902 | EVQLVESGGGLVKPGGSLRVSCAASGFTFSSYAMSWVRLAPGKGLEWVATISSAGGY | Anti-MUC16_V_{H} |
| | IFYSDSVQGRFTISRDNAKNSLYLQMNSLRAEDTAMYYCARQGFGNYGDYYAMDY | |
| | WGQGTLVTVSS | |
| 903 | GFSLSTVGMG | Anti-MUC16_HCDR1 |
| 904 | IWWDDEDK | Anti-MUC16_HCDR2 |
| 905 | TRIGTAQATDALDY | Anti-MUC16_HCDR3 |
| 906 | QVTLKESGPGILQPTQTLTLTCTFSGFSLSTVGMGVGWSRQPSGKGLEWLAHIWWDD | Anti-MUC16_V_{H} |
| | EDKYYNPALKSRLTITKDTSKNQVFLKITNVDTADTATYYCTRIGTAQATDALDYWG | |
| | QGTLVTVSS | |
| 907 | QVTLKESGPTLVKPTQTLTLTCTFSGFSLSTVGMGVGWSRQPSGKGLEWLAHIWWDD | Anti-MUC16_V_{H} |
| | EDKYYNPALKSRLTITKDTSKNQVVLTITNVDPVDTATYYCTRIGTAQATDALDYWG | |
| | QGTLVTVSS | |
| 908 | QSLLNSRTRKNQ | Anti-MUC16_LCDR1 |
| 909 | WAS | Anti-MUC16_LCDR2 |
| 910 | QQSYNLLT | Anti-MUC16_LCDR3 |
| 911 | DIELTQSPSSLAVSAGERVTMNCKSSQSLLNSRTRKNQLAWYQQKPGQSPELLIYWAS | Anti-MUC16_VL |
| | TRQSGVPDRFSGSGSGTDFTLTISSVQAEDVAVYYCQQSYNLLTFGPGTKLEIKR | |
| 912 | DIVLTQSPDSLAVSLGERVTMNCKSSQSLLNSRTRKNQLAWYQQKPGQSPELLIYWA | Anti-MUC16VL |
| | STRQSGVPDRFSGSGSGTDFTLTISSVQAEDVAVYYCQQSYNLLTFGQGTKLEIKR | |
| 913 | KSLLHSNGNTY | Anti-MUC16_LCDR1 |
| 914 | YMS | Anti-MUC16_LCDR2 |
| 915 | MQSLEYPLT | Anti-MUC16_LCDR3 |
| 916 | DIVMTQSAPSVPVTPGESVSISCRSSKSLLHSNGNTYLYWFLQKPGQSPQRLIYYMSNL | Anti-MUC16_VL |
| | ASGVPDRFSGRGSGTDFTLKISRVEAEDVGVYYCMQSLEYPLTFGGGTKLEIKR | |
| 917 | DIVMTQSALSLPVTPGEPVSISCRSSKSLLHSNGNTYLYWFLQKPGQSPQRLIYYMSNL | Anti-MUC16_VL |
| | ASGVPDRFSGSGSGTDFTLKISRVEAEDVGVYYCMQSLEYPLTFGGGTKLEIKR | |
| 918 | GYGLS | Anti-FRα_HCDR1 |
| 919 | MISSGGSYTYYAD | Anti-FRα_HCDR2 |
| 920 | HGDDPAWFAY | Anti-FRα_HCDR3 |
| 921 | EVQLVESGGGVVQPGRSLRLSCSASGFTFSGYGLSWVRQAPGKGLEWVAMISSGGSY | Anti-FRα_V_{H} |
| | TYYADSVKGRFAISRDNAKNTLFLQMDSLRPEDTGVYFCARHGDDPAWFAYWGQGT | |
| | PVTVSS | |
| 922 | EVQLVESGGGVVQPGRSLRLSCSASGFTFSGYGLSWVRQAPGKGLEWVAMISSGGSY | Anti-FRα_heavy chain |
| | TYYADSVKGRFAISRDNAKNTLFLQMDSLRPEDTGVYFCARHGDDPAWFAYWGQGT | |
| | PVTVSSASTKGPSVFPLAPSSKSTSGGTAALGCLVKDYFPEPVTVSWNSGALTSGVHT | |
| | FPAVLQSSGLYSLSSVVTVPSSSLGTQTYICNVNHKPSNTKVDKKVEPKSCDKTHTCPP | |
| | CPAPELLGGPSVFLFPPKPKDTLMISRTPEVTCVVVDVSHEDPEVKFNWYVDGVEVH | |
| | NAKTKPREEQYNSTYRVVSVLTVLHQDWLNGKEYKCKVSNKALPAPIEKTISKAKGQ | |
| | PREPQVYTLPPSRDELTKNQVSLTCLVKGFYPSDIAVEWESNGQPENNYKTTPPVLDS | |
| | DGSFFLYSKLTVDKSRWQQGNVFSCSVMHEALHNHYTQKSLSLSPGK | |
| 923 | SVSSSISSNNLH | Anti-FRα_LCDR1 |
| 924 | GTSNLAS | Anti-FRα_LCDR2 |
| 925 | QQWSSYPYMYT | Anti-FRα_LCDR3 |
| 926 | DIQLTQSPSSLSASVGDRVTITCSVSSSISSNNLHWYQQKPGKAPKPWIYGTSNLASGV | Anti-FRα_VL |
| | PSRFSGSGSGTDYTFTISSLQPEDIATYYCQQWSSYPYMYTFGQGTKVEIK | |
| 927 | DIQLTQSPSSLSASVGDRVTITCSVSSSISSNNLHWYQQKPGKAPKPWIYGTSNLASGV | Anti-FRα_light chain |
| | PSRFSGSGSGTDYTFTISSLQPEDIATYYCQQWSSYPYMYTFGQGTKVEIKRTVAAPSV | |
| | FIFPPSDEQLKSGTASVVCLLNNFYPREAKVQWKVDNALQSGNSQESVTEQDSKDST | |
| | YSLSSTLTLSKADYEKHKVYACEVTHQGLSSPVTKSENRGEC | |
| 928 | NYGVH | Anti-EGFR_HCDR1 |
| 929 | GVIWSGGNTDYNTPFT | Anti-EGFR_HCDR2 |
| 930 | RALTYYDYEFAYW | Anti-EGFR_HCDR3 |
| 931 | EVQLVESGGGLVQPGGSLRLSCAVSGFSLTNYGVHWVRQATGKGLEWLGVIWSGGN | Anti-EGFR_V_{H} |
| | TDYNTPFTSRLTISKENAKNSVYLQMNSLRAGDTAVYYCARALTYYDYEFAYWGQG | |
| | TMVTVSS | |
| 932 | RASQSIGTNIH | Anti-EGFR_LCDR1 |
| 933 | YASESIS | Anti-EGFR_LCDR2 |
| 934 | QQNNNWP | Anti-EGFR_LCDR3 |
| 935 | EIVLTQSPATLSLSPGERATLSCRASQSIGTNIHWYQQRPGQAPRLLIYYASESISGIPAR | Anti-EGFR_VL |
| | FSGSGSGTDFTLTISSLEPEDFAVYYCQQNNNWPTTFGGGTKVEIK | |
| 936 | DILLTQSPVILSVSPGERVSFSCRASQSIGTNIHWYQQRTNGSPRLLIKYASESISGIPSRF | Anti-EGFR scFv |
| | SGSGSGTDFTLSINSVESEDIADYYCQQNNNWPTTFGAGTKLELKRSRGGGGSGGGGS | |
| | GGGGSLEMAQVQLKQSGPGLVQPSQSLSITCTVSGFSLTNYGVHWVRQSPGKGLEWL | |
| | GVIWSGGNTDYNTPFTSRLSINKDNSKSQVFFKMNSLQSNDTAIYYCARALTYYDYEF | |
| | AYWGQGTLVTVSS | |
| 937 | GFTFRKFG | Anti- |
| | | EGFRVIII_HCDR1 |
| 938 | ISTGGYNT | Anti- |
| | | EGFRVIII_HCDR2 |
| 939 | TRGYSSTSYAMDY | Anti- |
| | | EGFRVIII_HCDR3 |
| 940 | QVKLQQSGGGLVKPGASLKLSCVTSGFTFRKFGMSWVRQTSDKRLEWVASISTGGY | Anti-EGFRVIII_V_{H} |
| | NTYYSDNVKGRFTISRENAKNTLYLQMSSLKSEDTALYYCTRGYSSTSYAMDYWGQ | |
| | GTTVTV | |
| 941 | TDIDDD | Anti- |
| | | EGFRVIII_LCDR1 |
| 942 | EGN | Anti- |
| | | EGFRVIII_LCDR2 |
| 943 | LQSFNVPLT | Anti- |
| | | EGFRVIII_LCDR3 |
| 944 | DIELTQSPASLSVATGEKVTIRCMTSTDIDDDMNWYQQKPGEPPKFLISEGNTLRPGVP | Anti-EGFRVIII_V_{L} |
| | SRFSSSGTGTDFVFTIENTLSEDVGDYYCLQSFNVPLTFGDGTKLEIK | |
| 945 | GFTFDDYA | Ant-HER3_HCDR1 |
| 946 | ISWNSGSI | Ant-HER3_HCDR2 |
| 947 | ARDLGAKQWLEGFDY | Ant-HER3_HCDR3 |
| 948 | MKYLLPTAAAGLLLLAAQPAMAQVQLVQSGGGLVQPGRSLRLSCAASGFTFDDYAM | Ant-HER3_V_{H} |
| | HWVRQAPGKGLEWVSGISWNSGSIGYADSVKGRFTISRDNAKNSLYLQMNSLRPEDT | |
| | AVYYCARDLGAKQWLEGFDYWGQGTLVTV | |
| 949 | SLRSYY | Ant-HER3_LCDR1 |
| 950 | GKN | Ant-HER3_LCDR2 |
| 951 | NSRDSSGNHWV | Ant-HER3_LCDR3 |
| 952 | NFMLTQDPAVSVALGQTVRITCQGDSLRSYYASWYQQKPGQAPVLVIYGKNNRPSGI | Ant-HER3_VL |
| | PDRFSGSTSGNSASLTITGAQAEDEADYYCNSRDSSGNHWVFGGGTKVTVLGAAAEQ | |
| | KLISEEDLNGAA | |
| 953 | MKYLLPTAAAGLLLLAAQPAMAQVQLVQSGGGLVQPGRSLRLSCAASGFTFDDYAM | Anti-HER3 scFv |
| | HWVRQAPGKGLEWVSGISWNSGSIGYADSVKGRFTISRDNAKNSLYLQMNSLRPEDT | |
| | AVYYCARDLGAKQWLEGFDYWGQGTLVTVSSGGGGSGGGGSGGGGSNFMLTQDPA | |
| | VSVALGQTVRITCQGDSLRSYYASWYQQKPGQAPVLVIYGKNNRPSGIPDRFSGSTSG | |
| | NSASLTITGAQAEDEADYYCNSRDSSGNHWVFGGGTKVTVLGAAAEQKLISEEDLNG | |
| | AAHHHHHH | |
| 954 | DYYMN | Anti-DLL3_HCDR1 |
| 955 | LIRNKANGYTTEYNASVKG | Anti-DLL3_HCDR2 |
| 956 | DSDGYYEYYFDY | Anti-DLL3_HCDR3 |
| 957 | MKLWLNWIFLVTLLNGIQCEVKLVESGGGLVQPGGSLSLSCAASGFTFTDYYMNWV | Anti-DLL3_Heavy |
| | RQPPGKALEWLALIRNKANGYTTEYNASVKGRFTISRDNSQNILYLQMNALRAEDSA | Chain |
| | TYYCARDSDGYYEYYFDYWGQGTTLTVSSASTKGPSVFPLAPSSKSTSGGTAALGCL | |
| | VKDYFPEPVTVSWNSGALTSGVHTFPAVLQSSGLYSLSSVVTVPSSSLGTQTYICNVN | |
| | HKPSNTKVDKKVEPKSCDKTHTCPPCPAPELLGGPSVFLFPPKPKDTLMISRTPEVTCV | |
| | VVDVSHEDPEVKFNWYVDGVEVHNAKTKPREEQYNSTYRVVSVLTVLHQDWLNGK | |
| | EYKCKVSNKALPAPIEKTISKAKGQPREPQVYTLPPSRDELTKNQVSLTCLVKGFYPSD | |
| | IAVEWESNGQPENNYKTTPPVLDSDGSFFLYSKLTVDKSRWQQGNVFSCSVMHEALH | |
| | NHYTQKSLSLSPGK | |
| 958 | RASQEISDYLS | Anti-DLL3_LCDR1 |
| 959 | AASTLDS | Anti-DLL3_LCDR2 |
| 960 | LQYASYPYT | Anti-DLL3_LCDR3 |
| 961 | MDMRVPAHVFGFLLLWFPGTRCDIQMTQSPSSLSASLGERVSLTCRASQEISDYLSWL | Anti-DLL3_Light |
| | QQKPDGTIKRLIFAASTLDSGVPKRFSGSRSGSDFSLSISSLESEDFADYYCLQYASYPY | Chain |
| | TFGSGTKLEIKRTVAAPSVFIFPPSDEQLKSGTASVVCLLNNFYPREAKVQWKVDNAL | |
| | QSGNSQESVTEQDSKDSTYSLSSTLTLSKADYEKHKVYACEVTHQGLSSPVTKSFNRG | |
| | EC | |
| 962 | SGGYYWS | Anti-C-MET_HCDR1 |
| 963 | YIYYSGSTYYNPSLKS | Anti-C-MET_HCDR2 |
| 964 | LGPLGYCSSTSCPVTGEYYYYGMDV | Anti-C-MET_HCDR3 |
| 965 | MKHLWFFLLLVAAPRWVLSQVQLQESGPGLVKPSQTLSLTCTVSGGSISSGGYYWSW | Anti-C-MET_Heavy |
| | IRQHPGKGLEWIGYIYYSGSTYYNPSLKSRVTISVDTSKNQFSLKLSSVTAADTAVYYC | Chain |
| | ARDGPLGYCSSTSCPVTGEYYYYGMDVWGQGTTVTVSSASTKGPSVFPLAPCSRSTS | |
| | ESTAALGCLVKDYFPEPVTVSWNSGALTSGVHTFPAVLQSSGLYSLSSVVTVPSSNFG | |
| | TQTYTCNVDHKPSNTKVDKTVERKCCVECPPCPAPPVAGPSVFLFPPKPKDTLMISRT | |
| | PEVTCVVVDVSHEDPEVQFNWYVDGVEVHNAKTKPREEQFNSTFRVVSVLTVVHQD | |
| | WLNGKEYKCKVSNKGLPAPIEKTISKTKGQPREPQVYTLPPSREEMTKNQVSLTCLVK | |
| | GFYPSDIAVEWESNGQPENNYKTTPPMLDSDGSFFLYSKLTVDKSRWQQGNVFSCSV | |
| | MHEALHNHYTQKSLSLSPGK | |
| 966 | RASQSVSNNYLA | Anti-C-MET_LCDR1 |
| 967 | GASSRAT | Anti-C-MET_LCDR2 |
| 968 | QQYDISPMYS | Anti-C-MET_LCDR3 |
| 969 | METPAQLLFLLLLWLPDTTGEIVLTQSPGTLSLSPGERATLSCRASQSVSNNYLAWYQ | Anti-C-MET_Light |
| | QKPGQAPRLLIFGASSRATGIPDRFSGSGSGTDFTLTISRLEPEDFAVYYCQQYDISPMY | Chain |
| | SFGQGTKLEMKRTVAAPSVFIFPPSDEQLKSGTASVVCLLNNFYPREAKVQWKVDNA | |
| | LQSGNSQESVTEQDSKDSTYSLSSTLTLSKADYEKHKVYACEVTHQGLSSPVTKSFNR | |
| | GEC | |
| 970 | GYTFTNYGMN | Anti-CD70_HCDR1 |
| 971 | WINTYTGEPTYADAFK | Anti-CD70_HCDR2 |
| 972 | DYGDYGMDY | Anti-CD70_HCDR3 |
| 973 | MAWVWTLLFLMAAAQSAGAQIQLVQSGPEVKKPGETVKISCKASGYTFTNYGMNW | Anti-CD70_V_{H} |
| | VKQAPGKGLKWMGWINTYTGEPTYADAFKGRFAFSLETSASTAYLQINNLKNEDTA | |
| | TYFCARDYGDYGMDYWGQGTSVTVSS | |
| 974 | RASKSVSTSGYSFMH | Anti-CD70_LCDR1 |
| 975 | LASNLES | Anti-CD70_LCDR2 |
| 976 | QHSREVPWT | Anti-CD70_LCDR3 |
| 977 | METDTLLLWVLLLWVPGSTGDIVLTQSPASLAVSLGQRATISCRASKSVSTSGYSFMH | Anti-CD70_V_{L} |
| | WYQQKPGQPPKLLIYLASNLESGVPARFSGSGSGTDFTLNIHPVEEEDAATYYCQHSR | |
| | EVPWTFGGGTKLEIKR | |

[0470] One or more features from any embodiments described herein or in the figures may be combined with one or more features of any other embodiment described herein in the figures without departing from the scope of the disclosure.

[0471] All publications, patents and patent applications cited in this specification are herein incorporated by reference as if each individual publication or patent application were specifically and individually indicated to be incorporated by reference. Although the foregoing disclosure has been described in some detail by way of illustration and example for purposes of clarity of understanding, it will be readily apparent to those of ordinary skill in the art in light of the teachings of this disclosure that certain changes and modifications may be made thereto without departing from the spirit or scope of the appended claims.

What is claimed:

1. An immune cell comprising:
(a) a chimeric antigen receptor (CAR) comprising:
(i) an extracellular target-binding domain comprising an antibody moiety (a CAR antibody moiety);
(ii) a transmembrane domain (a CAR transmembrane domain); and
(iii) a primary signaling domain, and
(b) a chimeric stimulating receptor (CSR) comprising:
(i) a ligand-binding module that is capable of binding or interacting with a target ligand;
(ii) a transmembrane domain (a CSR transmembrane domain); and
(iii) a CD30 costimulatory domain,
wherein the CSR lacks a functional primary signaling domain.

2. The immune cell of claim 1, wherein the CD30 costimulatory domain comprises a sequence that can bind to an intracellular TRAF signaling protein, optionally wherein the sequence that can bind to an intracellular TRAF signaling protein corresponds to residues 561-573 or 578-586 of a full-length CD30 having the sequence of SEQ ID NO:65.

3. The immune cell of claim 1 or 2, wherein the CD30 costimulatory domain comprises a sequence that is at least 80%, 85%, 90%, 95%, or 100% identical to residues 561-573 or 578-586 of SEQ ID NO:65; or wherein the CD30 costimulatory domain comprises a sequence that is at least 70%, 75%, 80%, 85%, 90%, 95%, or 100% identical to the sequence of SEQ ID NO:75.

4. The immune cell of any one of claims 1 to 3, wherein the CSR comprises more than one CD30 costimulatory domain.

5. The immune cell of any one of claims 1 to 4, wherein the CSR further comprises at least one costimulatory domain which comprises the intracellular sequence of a costimulatory molecule that is different from CD30, optionally wherein the costimulatory molecule that is different from CD30 is selected from the group consisting of CD27, CD28, 4-1BB (CD137), OX40, CD40, PD-1, ICOS, lymphocyte function-associated antigen-1 (LFA-1), CD2, CD7, LIGHT, NKG2C, B7-H3, and a ligand that specifically binds with CD83.

6. The immune cell of any one of claims 1 to 5, wherein the CAR further comprises a costimulatory domain (a CAR costimulatory domain), optionally wherein the CAR costimulatory domain is derived from the intracellular domain of a costimulatory receptor, and further optionally wherein the costimulatory receptor is selected from the group consisting of CD30, CD27, CD28, 4-1BB (CD137), OX40, CD40, PD-1, ICOS, lymphocyte function-associated antigen-1 (LFA-1), CD2, CD7, LIGHT, NKG2C, B7-H3, and a ligand that specifically binds with CD83.

7. The immune cell of any one of claims 1 to 6, wherein (a) the ligand-binding module of the CSR is derived from the extracellular domain of a receptor; or (b) the ligand-binding module of the CSR comprises an antibody moiety (a CSR antibody moiety), optionally wherein the CSR antibody moiety is a single chain antibody fragment.

8. The immune cell of any one of claims 1 to 7, wherein the CAR antibody moiety is a single chain antibody fragment; and/or wherein the CAR antibody moiety and/or the CSR antibody moiety is a single chain Fv (scFv), a single chain Fab, a single chain Fab′, a single domain antibody fragment, a single domain multispecific antibody, an intrabody, a nanobody, or a single chain immunokine.

9. The immune cell of any one of claims 1 to 8, wherein the CAR antibody moiety and/or the CSR antibody moiety specifically binds to a disease-related antigen, optionally wherein the disease-related antigen is a cancer-related antigen or a virus-related antigen.

10. The immune cell of any one of claims 1 to 9, wherein the CAR antibody moiety and/or the CSR antibody moiety specifically binds to a cell surface antigen, optionally wherein the cell surface antigen is selected from the group consisting of protein, carbohydrate, and lipid; and/or optionally wherein the cell surface antigen is CD19, CD20, CD22, CD47, CD158e, GPC3, ROR1, ROR2, BCMA, GPRC5D, FcRL5, MUC16, MCT4, PSMA, or a variant or mutant thereof.

11. The immune cell of any one of claims 1 to 10, (a) wherein the CAR antibody moiety and the CSR antibody moiety specifically bind to the same antigen; or (b) wherein the CAR antibody moiety and/or the CSR antibody moiety specifically binds to a MHC-restricted antigen, optionally wherein the MHC-restricted antigen is a complex comprising a peptide and an MHC protein, and wherein the peptide is derived from a protein selected from the group consisting of WT-1, AFP, GPC3, HPV16-E7, NY-ESO-1, PRAME, EBV-LMP2A, HIV-1, KRAS, FoxP3, Histone H3.3, PSA, ROR1, and a variant or mutant thereof.

12. The immune cell of any one of claims 1 to 11, wherein:
(a) the CAR antibody moiety binds to CD19, and wherein the ligand-binding module of the CSR binds to CD19; or
(b) the CAR antibody moiety binds to CD22, and wherein the ligand-binding module of the CSR binds to CD22; or
(c) the CAR antibody moiety binds to CD20, and wherein the ligand-binding module of the CSR binds to CD20; or
(d) the CAR antibody moiety binds to CD19, and wherein the ligand-binding module of the CSR binds to CD22; or
(e) the CAR antibody moiety binds to CD19, and wherein the ligand-binding module of the CSR binds to CD20; or
(f) the CAR antibody moiety binds to CD22, and wherein the ligand-binding module of the CSR binds to CD20;
(g) the CAR antibody moiety binds to CD22, and wherein the ligand-binding module of the CSR binds to CD19; or
(h) the CAR antibody moiety binds to CD20, and wherein the ligand-binding module of the CSR binds to CD19; or
(i) the CAR antibody moiety binds to CD20, and wherein the ligand-binding module of the CSR binds to CD22; or
(j) the CAR antibody moiety and/or the ligand-binding module of the CSR binds to both CD19 and CD22; or
(k) the CAR antibody moiety and/or the ligand-binding module of the CSR binds to both CD19 and CD20; or
(l) the CAR antibody moiety and/or the ligand-binding module of the CSR binds to both CD20 and CD22; or
(m) the CAR antibody moiety and/or the ligand-binding module of the CSR binds to CD19, CD20, and CD22.

13. The immune cell of any one of claims 1 to 12, wherein:
(a) the CAR antibody moiety specifically binds to a complex comprising an alpha-fetoprotein (AFP) peptide and an MHC class I protein; or
(b) the CAR antibody moiety specifically binds to glypican 3 (GPC3); or
(c) the ligand-binding module of the CSR specifically binds to GPC3; or
(d) the CAR antibody moiety binds to a complex comprising an AFP peptide and an MHC class I protein, and wherein the ligand-binding module of the CSR binds to GPC3; or
(e) both the CAR antibody moiety and the ligand-binding module of the CSR bind to GPC3; or
(f) the CAR antibody moiety and the ligand-binding module of the CSR specifically bind to different epitopes on GPC3; or
(g) the CAR antibody moiety specifically binds to a complex comprising a KRAS peptide and an MHC class I protein; or
(h) the CAR antibody moiety specifically binds to a complex comprising a PSA peptide and an MHC class I protein; or
(i) the CAR antibody moiety specifically binds to a complex comprising a PSMA peptide and an MHC class I protein; or
(j) the CAR antibody moiety and/or the ligand-binding module of the CSR bind to ROR1; or
(k) the CAR antibody moiety specifically binds to a complex comprising a NY-ESO-1 peptide and an MHC class I protein; or
(l) the CAR antibody moiety specifically binds to a complex comprising a PRAME peptide and an MHC class I protein; or
(m) the CAR antibody moiety specifically binds to a complex comprising a WT1 peptide and an MHC class I protein; or
(n) the CAR antibody moiety specifically binds to a complex comprising a histone H3.3 peptide and an MHC class I protein; or
(o) the ligand-binding module of the CSR binds to an MSLN peptide; or
(p) the ligand-binding module of the CSR binds to a ROR2 peptide; or
(q) the ligand-binding module of the CSR binds to a HER2 peptide; or
(r) the ligand-binding module of the CSR binds to an EpCAM peptide; or
(s) the ligand-binding module of the CSR binds to a MUC1 peptide; or
(t) the ligand-binding module of the CSR binds to a MUC16 peptide; or
(u) the ligand-binding module of the CSR binds to an FRα peptide; or
(v) the ligand-binding module of the CSR binds to an EGFRVIII peptide; or
(w) the ligand-binding module of the CSR binds to an HER3 peptide; or
(x) the ligand-binding module of the CSR binds to a DLL3 peptide; or
(y) the ligand-binding module of the CSR binds to a c-Met peptide; or
(z) the ligand-binding module of the CSR binds to a CD70 peptide.

14. The immune cell of any one of claims 1 to 13, wherein:
(a) the CAR transmembrane domain is the transmembrane domain of CD30; or
(b) the CAR transmembrane domain is the transmembrane domain of CD8; and/or
(c) the CSR transmembrane domain is derived from the transmembrane domain of a TCR co-receptor or a T cell co-stimulatory molecule, optionally wherein the TCR co-receptor or T cell co-stimulatory molecule is selected from the group consisting of CD8, 4-1BB, CD27, CD28, CD30, OX40, CD3ε, CD3ζ, CD45, CD4, CD5, CD9, CD16, CD22, CD33, CD37, CD64, CD80, CD86, CD134, CD137, and CD154; or
(d) the CAR transmembrane domain and/or the CSR transmembrane domain is the transmembrane domain of CD8, 4-1BB, CD27, CD28, CD30, OX40, CD3ε, CD3ζ, CD45, CD4, CD5, CD9, CD16, CD22, CD33, CD37, CD64, CD80, CD86, CD134, CD137, or CD154; and/or
(e) the CAR transmembrane domain and/or the CSR transmembrane domain comprises an amino acid sequence selected from the group consisting of SEQ ID NOS:66-71.

15. The immune cell of any one of claims 1 to 14, wherein:
(a) the primary signaling domain comprises a sequence derived from the intracellular signaling sequence of a molecule selected from the group consisting of CD3ζ, TCRζ, FcRγ, FcRβ, CD3γ, CD3δ, CD3ε, CD5, CD22, CD79a, CD79b, and CD66d; and/or
(b) the primary signaling domain comprises a sequence that is at least 80%, 85%, 90%, 95%, or 100% identical to the sequence of SEQ ID NO:77.

16. The immune cell of any one of claims 1 to 15, further comprises a peptide linker between the extracellular target-binding domain and the transmembrane domain of the CAR; and/or further comprises a peptide linker between the transmembrane domain and the costimulatory domain of the CAR; and/or further comprises a peptide linker between the costimulatory domain and the primary signaling domain of the CAR; and/or further comprises a peptide linker between the ligand-binding module and the transmembrane domain of the CSR; and/or further comprises a peptide linker between the transmembrane domain and the CD30 costimulatory domain of the CSR.

17. The immune cell of any one of claims 1 to 16, wherein the expression of the CSR is inducible, optionally wherein the expression of the CSR is inducible upon activation of the immune cell.

18. The immune cell of any one of claims 1 to 17, wherein the immune cell is selected from the group consisting of a cytotoxic T cell, a helper T cell, a natural killer T cell, and a suppressor T cell.

19. One or more nucleic acids encoding the CAR and CSR comprised by the immune cell of any one of claims 1 to 18, wherein the CAR and CSR each consist of one or more polypeptide chains encoded by the one or more nucleic acids.

20. One or more vectors comprising the one or more nucleic acids of claim 19.

21. A pharmaceutical composition comprising: (a) the immune cell of any one of claims 1 to 18, the nucleic acid(s) of claim 19, or the vector(s) of claim 20, and (b) a pharmaceutically acceptable carrier or diluent.

22. A method of killing target cells, comprising:
contacting one or more target cells with the immune cell of any one of claims 1 to 18 under conditions and for a time sufficient so that the immune cells mediate killing of the target cells,
wherein the target cells express an antigen specific to the immune cell, and
wherein the immune cell expresses a low cell exhaustion level upon contacting the target cells,
optionally wherein the immune cell is a T cell; and/or
optionally wherein the target cells are cancer cells.

23. The method of claim 22, wherein:
(a) the immune cell expresses a low cell exhaustion level of an exhaustion marker selected from the group consisting of PD-1, TIM-3, TIGIT, and LAG-3; and/or
(b) the immune cell expresses a lower level of PD-1, TIM-3, TIGIT, or LAG-3 than corresponding immune cell expressing a CSR comprising a CD28 costimulatory domain; and/or
(c) the immune cell expresses a lower level of PD-1, TIM-3, TIGIT, or LAG-3 than corresponding immune cell expressing a CSR comprising a 4-1BB costimulatory domain.

24. The method of claim 22 or 23, wherein:
(a) the cancer cells are from a cancer selected from the group consisting of adrenocortical carcinoma, bladder cancer, breast cancer, cervical cancer, cholangiocarcinoma, colorectal cancers, esophageal cancer, glioblastoma, glioma, hepatocellular carcinoma, head and neck cancer, kidney cancer, leukemia, lymphoma, lung cancer, melanoma, mesothelioma, multiple myeloma, pancreatic cancer, pheochromocytoma, plasmacytoma, neuroblastoma, ovarian cancer, prostate cancer, sarcoma, stomach cancer, uterine cancer, and thyroid cancer; and/or
(b) the cancer cells are hematological cancer cells; or
(c) the cancer cells are solid tumor cells.

25. The method of any one of claims 22 to 24, wherein the target cells are virus-infected cells, optionally wherein the virus-infected cells are from a viral infection caused by a virus selected from the group consisting of Cytomegalovirus (CMV), Epstein-Barr Virus (EBV), Hepatitis B Virus (HBV), Kaposi's Sarcoma associated herpesvirus (KSHV), Human papillomavirus (HPV), Molluscum contagiosum virus (MCV), Human T cell leukemia virus 1 (HTLV-1), HIV (Human immunodeficiency virus), and Hepatitis C Virus (HCV).

26. A method of treating a disease, the method comprising a step of administering to a subject the immune cell of any one of claims 1 to 18, the nucleic acid(s) of claim 19, or the vector(s) of claim 20, or the pharmaceutical composition of claim 21 to the subject.

27. The method of claim 26, wherein the disease is a viral infection or cancer, optionally wherein the cancer is a hematological cancer or a solid tumor cancer; and/or optionally wherein the cancer is selected from the group consisting of adrenocortical carcinoma, bladder cancer, breast cancer, cervical cancer, cholangiocarcinoma, colorectal cancers, esophageal cancer, glioblastoma, glioma, hepatocellular carcinoma, head and neck cancer, kidney cancer, leukemia, lymphoma, lung cancer, melanoma, mesothelioma, multiple myeloma, pancreatic cancer, pheochromocytoma, plasmacytoma, neuroblastoma, ovarian cancer, prostate cancer, sarcoma, stomach cancer, uterine cancer, and thyroid cancer.

28. The method of claim 26 or 27, wherein:
(a) the subject has a higher density of the immune cell of any one of claims 1 to 18 in the solid tumor cancer than in the rest of the subject's body; and/or
(b) the subject has a higher density of the immune cell of any one of claims 1 to 18 in the peripheral blood of the subject as compared to treating the same type of disease with same number of immune cells expressing the same CAR and a corresponding CSR comprising a CD28 or 4-1BB costimulatory domain.

29. A method for preventing and/or reversing T cell exhaustion in a subject, comprising administering to the subject the nucleic acid(s) of claim 19, or the vector(s) of claim 20, or the pharmaceutical composition of claim 21 comprising the nucleic acid(s) or the vector(s) to the subject, optionally wherein the method decreases the expression of an exhaustion marker in a T cell, further optionally the exhaustion marker is selected from the group consisting of PD-1, TIM-3, TIGIT, and LAG-3.

30. A method of treating a solid tumor cancer in a subject with increased tumor infiltration as compared to treating the same type of solid tumor cancer with immune cells expressing a CAR and a CSR comprising a CD28 or 4-1BB costimulatory domain, wherein the method comprises administering to the subject corresponding immune cells expressing the same CAR and a corresponding CSR comprising a CD30 costimulatory domain, and wherein the corresponding immune cells comprise the immune cell of any one of claims 1 to 18.

31. A method of treating a solid tumor cancer in a subject with increased tumor regression as compared to treating the same type of solid tumor cancer with immune cells expressing a CAR and a CSR comprising a CD28 or 4-1BB costimulatory domain, wherein the method comprises administering to the subject corresponding immune cells expressing the same CAR and a corresponding CSR comprising a CD30 costimulatory domain, and wherein the corresponding immune cells comprise the immune cell of any one of claims 1 to 18.

32. A method for generating central memory T cells in a subject, comprising administering to the subject the nucleic acid(s) of claim 19, or the vector(s) of claim 20, or the pharmaceutical composition of claim 21 comprising the nucleic acid(s) or the vector(s) to the subject, optionally wherein the method increases the number of central memory T cells and/or the percentage of central memory T cells among all T cells in the subject.

33. A method for generating central memory T cells in vitro comprising: contacting one or more target cells with the immune cell of any one of claims 1 to 18 under conditions and for a time sufficient so that the immune cell develops into central memory T cells, wherein the target cells express an antigen specific to the immune cell.

34. The method of claim 33, wherein:
(a) the method increases the number of central memory T cells and/or the percentage of central memory T cells among all T cells descended from the immune cell; and/or
(b) the method generates higher number of central memory T cells and/or higher percentage of central memory T cells than corresponding immune cell expressing a CSR comprising a CD28 costimulatory domain, optionally wherein the method generates at least 10%, 20%, 30%, 40%, 50%, 60%, 70%, 80%, 90%, 100%, 200%, 300%, 400%, or 500% higher number of central memory T cells and/or percentage of central memory T cells than corresponding immune cell expressing a CSR comprising a CD28 costimulatory domain.

35. The method of any one of claim 33 or 34, wherein the central memory T cells express high levels of CCR7 and low levels of CD45RA; and/or wherein the central memory T cells are CD8⁺ T cells.

The application's sequence listing, which the Patent Office published only in electronic form, follows.

SEQUENCE LISTING (981 sequences)

SEQ ID NO: 1 - protein, 465 aa, Artificial Sequence
  Description of Artificial Sequence: Synthetic polypeptide
METDTLLLWVLLLWVPGSTGQSVLTQPASVSGSPGQSITISCTGTSSDVGGYNYVSWYQQHPGKAPKLMIYDVNNRPSEVSNRFSGSKSGNTASLTISGLQAEDEADYYCSSYTTGSRAVFGGGTKLTVLGSRGGGGSGGGGSGGGGSLEMAEVQLVQSGAEVKKPGESLTISCKASGYSFPNYWITWVRQMSGGGLEWMGRIDPGDSYTTYNPSFQGHVTISIDKSTNTAYLHWNSLKASDTAMYYCARYYVSLVDIWGQGTLVTVSSEQKLISEEDLAAATGTTTPAPRPPTPAPTIASQPLSLRPEACRPAAGGAVHTRGLDFACDIYIWAPLAGTCGVLLLSLVITLYCRVKFSRSADAPAYQQGQNQLYNELNLGRREEYDVLDKRRGRDPEMGGKPRRKNPQEGLYNELQKDKMAEAYSEIGMKGERRRGKGHDGLYQGLSTATKDTYDALHMQALPPR

SEQ ID NO: 2 - protein, 476 aa, Artificial Sequence
  Description of Artificial Sequence: Synthetic polypeptide
METDTLLLWVLLLWVPGSTGLPVLTQPPSVSVAPGKTARITCGGNNIGSKSVHWYQQKPGQAPVLVVYDDSDRPSGIPERFSGSNSGNTATLTISRVEAGDEADYYCQVWDSSSDYVVFGGGTKLTVLGSRGGGGSGGGGSGGGGSLEMAEVQLVQSGAEVKKPGESLKISCKGSGYSFTSYWIGWVRQMPGKGLEWMGIIYPGDSDTRYSPSFQGQVTISADKSISTAYLQWSSLKASDTAMYYCARQVWGWQGGMYPRSNWWYNLDSWGQGTLVTVSSEQKLISEEDLAAATGTTTPAPRPPTPAPTIASQPLSLRPEACRPAAGGAVHTRGLDFACDIYIWAPLAGTCGVLLLSLVITLYCRVKFSRSADAPAYQQGQNQLYNELNLGRREEYDVLDKRRGRDPEMGGKPRRKNPQEGLYNELQKDKMAEAYSEIGMKGERRRGKGHDGLYQGLSTATKDTYDALHMQALPPR

SEQ ID NO: 3 - protein, 512 aa, Artificial Sequence
  Description of Artificial Sequence: Synthetic polypeptide
METDTLLLWVLLLWVPGSTGLPVLTQPPSVSVAPGKTARITCGGNNIGSKSVHWYQQKPGQAPVLVVYDDSDRPSGIPERFSGSNSGNTATLTISRVEAGDEADYYCQVWDSSSDYVVFGGGTKLTVLGSRGGGGSGGGGSGGGGSLEMAEVQLVQSGAEVKKPGESLKISCKGSGYSFTSYWIGWVRQMPGKGLEWMGIIYPGDSDTRYSPSFQGQVTISADKSISTAYLQWSSLKASDTAMYYCARQVWGWQGGMYPRSNWWYNLDSWGQGTLVTVSSEQKLISEEDLAAAIEVMYPPPYLDNEKSNGTIIHVKGKHLCPSPLFPGPSKPFWVLVVVGGVLACYSLLVTVAFIIFWVRSKRSRLLHSDYMNMTPRRPGPTRKHYQPYAPPRDFAAYRSRVKFSRSADAPAYQQGQNQLYNELNLGRREEYDVLDKRRGRDPEMGGKPRRKNPQEGLYNELQKDKMAEAYSEIGMKGERRRGKGHDGLYQGLSTATKDTYDALHMQALPPR

SEQ ID NO: 4 - protein, 677 aa, Artificial Sequence
  Description of Artificial Sequence: Synthetic polypeptide
METDTLLLWVLLLWVPGSTGLPVLTQPPSVSVAPGKTARITCGGNNIGSKSVHWYQQKPGQAPVLVVYDDSDRPSGIPERFSGSNSGNTATLTISRVEAGDEADYYCQVWDSSSDYVVFGGGTKLTVLGSRGGGGSGGGGSGGGGSLEMAEVQLVQSGAEVKKPGESLKISCKGSGYSFTSYWIGWVRQMPGKGLEWMGIIYPGDSDTRYSPSFQGQVTISADKSISTAYLQWSSLKASDTAMYYCARQVWGWQGGMYPRSNWWYNLDSWGQGTLVTVSSEQKLISEEDLAAATGAPPLGTQPDCNPTPENGEAPASTSPTQSLLVDSQASKTLPIPTSAPVALSSTGKPVLDAGPVLFWVILVLVVVVGSSAFLLCHRRACRKRIRQKLHLCYPVQTSQPKLELVDSRPRRSSTQLRSGASVTEPVAEERGLMSQPLMETCHSVGAAYLESLPLQDASPAGGPSSPRDLPEPRVSTEHTNNKIEKIYIMKADTVIVGTVKAELPEGRGLAGPAEPELEEELEADHTPHYPEQETEPPLGSCSDVMLSVEEEGKEDPLPTAASGKRVKFSRSADAPAYQQGQNQLYNELNLGRREEYDVLDKRRGRDPEMGGKPRRKNPQEGLYNELQKDKMAEAYSEIGMKGERRRGKGHDGLYQGLSTATKDTYDALHMQALPPR

SEQ ID NO: 5 - protein, 664 aa, Artificial Sequence
  Description of Artificial Sequence: Synthetic polypeptide
METDTLLLWVLLLWVPGSTGLPVLTQPPSVSVAPGKTARITCGGNNIGSKSVHWYQQKPGQAPVLVVYDDSDRPSGIPERFSGSNSGNTATLTISRVEAGDEADYYCQVWDSSSDYVVFGGGTKLTVLGSRGGGGSGGGGSGGGGSLEMAEVQLVQSGAEVKKPGESLKISCKGSGYSFTSYWIGWVRQMPGKGLEWMGIIYPGDSDTRYSPSFQGQVTISADKSISTAYLQWSSLKASDTAMYYCARQVWGWQGGMYPRSNWWYNLDSWGQGTLVTVSSEQKLISEEDLAAATGTTTPAPRPPTPAPTIASQPLSLRPEACRPAAGGAVHTRGLDFACDIYIWAPLAGTCGVLLLSLVITLYCHRRACRKRIRQKLHLCYPVQTSQPKLELVDSRPRRSSTQLRSGASVTEPVAEERGLMSQPLMETCHSVGAAYLESLPLQDASPAGGPSSPRDLPEPRVSTEHTNNKIEKIYIMKADTVIVGTVKAELPEGRGLAGPAEPELEEELEADHTPHYPEQETEPPLGSCSDVMLSVEEEGKEDPLPTAASGKRVKFSRSADAPAYQQGQNQLYNELNLGRREEYDVLDKRRGRDPEMGGKPRRKNPQEGLYNELQKDKMAEAYSEIGMKGERRRGKGHDGLYQGLSTATKDTYDALHMQALPPR

SEQ ID NO: 6 - protein, 515 aa, Artificial Sequence
  Description of Artificial Sequence: Synthetic polypeptide
METDTLLLWVLLLWVPGSTGLPVLTQPPSVSVAPGKTARITCGGNNIGSKSVHWYQQKPGQAPVLVVYDDSDRPSGIPERFSGSNSGNTATLTISRVEAGDEADYYCQVWDSSSDYVVFGGGTKLTVLGSRGGGGSGGGGSGGGGSLEMAEVQLVQSGAEVKKPGESLKISCKGSGYSFTSYWIGWVRQMPGKGLEWMGIIYPGDSDTRYSPSFQGQVTISADKSISTAYLQWSSLKASDTAMYYCARQVWGWQGGMYPRSNWWYNLDSWGQGTLVTVSSEQKLISEEDLTGTTTPAPRPPTPAPTIASQPLSLRPEACRPAAGGAVHTRGLDFACDIYIWAPLAGTCGVLLLSLVITLYCKRGRKKLLYIFKQPFMRPVQTTQEEDGCSCRFPEEEEGGCELRVKFSRSADAPAYQQGQNQLYNELNLGRREEYDVLDKRRGRDPEMGGKPRRKNPQEGLYNELQKDKMAEAYSEIGMKGERRRGKGHDGLYQGLSTATKDTYDALHMQALPPR

SEQ ID NO: 7 - protein, 501 aa, Artificial Sequence
  Description of Artificial Sequence: Synthetic polypeptide
METDTLLLWVLLLWVPGSTGQSVLTQPASVSGSPGQSITISCTGTSSDVGGYNYVSWYQQHPGKAPKLMIYDVNNRPSEVSNRFSGSKSGNTASLTISGLQAEDEADYYCSSYTTGSRAVFGGGTKLTVLGSRGGGGSGGGGSGGGGSLEMAEVQLVQSGAEVKKPGESLTISCKASGYSFPNYWITWVRQMSGGGLEWMGRIDPGDSYTTYNPSFQGHVTISIDKSTNTAYLHWNSLKASDTAMYYCARYYVSLVDIWGQGTLVTVSSEQKLISEEDLAAAIEVMYPPPYLDNEKSNGTIIHVKGKHLCPSPLFPGPSKPFWVLVVVGGVLACYSLLVTVAFIIFWVRSKRSRLLHSDYMNMTPRRPGPTRKHYQPYAPPRDFAAYRSRVKFSRSADAPAYQQGQNQLYNELNLGRREEYDVLDKRRGRDPEMGGKPRRKNPQEGLYNELQKDKMAEAYSEIGMKGERRRGKGHDGLYQGLSTATKDTYDALHMQALPPR

SEQ ID NO: 8 - protein, 666 aa, Artificial Sequence
  Description of Artificial Sequence: Synthetic polypeptide
METDTLLLWVLLLWVPGSTGQSVLTQPASVSGSPGQSITISCTGTSSDVGGYNYVSWYQQHPGKAPKLMIYDVNNRPSEVSNRFSGSKSGNTASLTISGLQAEDEADYYCSSYTTGSRAVFGGGTKLTVLGSRGGGGSGGGGSGGGGSLEMAEVQLVQSGAEVKKPGESLTISCKASGYSFPNYWITWVRQMSGGGLEWMGRIDPGDSYTTYNPSFQGHVTISIDKSTNTAYLHWNSLKASDTAMYYCARYYVSLVDIWGQGTLVTVSSEQKLISEEDLAAATGAPPLGTQPDCNPTPENGEAPASTSPTQSLLVDSQASKTLPIPTSAPVALSSTGKPVLDAGPVLFWVILVLVVVVGSSAFLLCHRRACRKRIRQKLHLCYPVQTSQPKLELVDSRPRRSSTQLRSGASVTEPVAEERGLMSQPLMETCHSVGAAYLESLPLQDASPAGGPSSPRDLPEPRVSTEHTNNKIEKIYIMKADTVIVGTVKAELPEGRGLAGPAEPELEEELEADHTPHYPEQETEPPLGSCSDVMLSVEEEGKEDPLPTAASGKRVKFSRSADAPAYQQGQNQLYNELNLGRREEYDVLDKRRGRDPEMGGKPRRKNPQEGLYNELQKDKMAEAYSEIGMKGERRRGKGHDGLYQGLSTATKDTYDALHMQALPPR

SEQ ID NO: 9 - protein, 653 aa, Artificial Sequence
  Description of Artificial Sequence: Synthetic polypeptide
METDTLLLWVLLLWVPGSTGQSVLTQPASVSGSPGQSITISCTGTSSDVGGYNYVSWYQQHPGKAPKLMIYDVNNRPSEVSNRFSGSKSGNTASLTISGLQAEDEADYYCSSYTTGSRAVFGGGTKLTVLGSRGGGGSGGGGSGGGGSLEMAEVQLVQSGAEVKKPGESLTISCKASGYSFPNYWITWVRQMSGGGLEWMGRIDPGDSYTTYNPSFQGHVTISIDKSTNTAYLHWNSLKASDTAMYYCARYYVSLVDIWGQGTLVTVSSEQKLISEEDLAAATGTTTPAPRPPTPAPTIASQPLSLRPEACRPAAGGAVHTRGLDFACDIYIWAPLAGTCGVLLLSLVITLYCHRRACRKRIRQKLHLCYPVQTSQPKLELVDSRPRRSSTQLRSGASVTEPVAEERGLMSQPLMETCHSVGAAYLESLPLQDASPAGGPSSPRDLPEPRVSTEHTNNKIEKIYIMKADTVIVGTVKAELPEGRGLAGPAEPELEEELEADHTPHYPEQETEPPLGSCSDVMLSVEEEGKEDPLPTAASGKRVKFSRSADAPAYQQGQNQLYNELNLGRREEYDVLDKRRGRDPEMGGKPRRKNPQEGLYNELQKDKMAEAYSEIGMKGERRRGKGHDGLYQGLSTATKDTYDALHMQALPPR

SEQ ID NO: 10 - protein, 504 aa, Artificial Sequence
  Description of Artificial Sequence: Synthetic polypeptide
METDTLLLWVLLLWVPGSTGQSVLTQPASVSGSPGQSITISCTGTSSDVGGYNYVSWYQQHPGKAPKLMIYDVNNRPSEVSNRFSGSKSGNTASLTISGLQAEDEADYYCSSYTTGSRAVFGGGTKLTVLGSRGGGGSGGGGSGGGGSLEMAEVQLVQSGAEVKKPGESLTISCKASGYSFPNYWITWVRQMSGGGLEWMGRIDPGDSYTTYNPSFQGHVTISIDKSTNTAYLHWNSLKASDTAMYYCARYYVSLVDIWGQGTLVTVSSEQKLISEEDLTGTTTPAPRPPTPAPTIASQPLSLRPEACRPAAGGAVHTRGLDFACDIYIWAPLAGTCGVLLLSLVITLYCKRGRKKLLYIFKQPFMRPVQTTQEEDGCSCRFPEEEEGGCELRVKFSRSADAPAYQQGQNQLYNELNLGRREEYDVLDKRRGRDPEMGGKPRRKNPQEGLYNELQKDKMAEAYSEIGMKGERRRGKGHDGLYQGLSTATKDTYDALHMQALPPR

SEQ ID NO: 11 - protein, 514 aa, Artificial Sequence
  Description of Artificial Sequence: Synthetic polypeptide
METDTLLLWVLLLWVPGSTGLPVLTQPPSVSVAPGKTARITCGGNNIGSKSVHWYQQKPGQAPVLVVYDDSDRPSGIPERFSGSNSGNTATLTISRVEAGDEADYYCQVWDSSSDYVVFGGGTKLTVLGSRGGGGSGGGGSGGGGSLEMAEVQLVQSGAEVKKPGESLKISCKGSGYSFTSYWIGWVRQMPGKGLEWMGIIYPGDSDTRYSPSFQGQVTISADKSISTAYLQWSSLKASDTAMYYCARQVWGWQGGMYPRSNWWYNLDSWGQGTLVTVSSEQKLISEEDLTGTTTPAPRPPTPAPTIASQPLSLRPEACRPAAGGAVHTRGLDFACDIYIWAPLAGTCGVLLLSLVITLYCRSKRSRLLHSDYMNMTPRRPGPTRKHYQPYAPPRDFAAYRSRVKFSRSADAPAYQQGQNQLYNELNLGRREEYDVLDKRRGRDPEMGGKPRRKNPQEGLYNELQKDKMAEAYSEIGMKGERRRGKGHDGLYQGLSTATKDTYDALHMQALPPR

SEQ ID NO: 12 - protein, 509 aa, Artificial Sequence
  Description of Artificial Sequence: Synthetic polypeptide
METDTLLLWVLLLWVPGSTGQSVLTQPASVSGSPGQSITISCTGTSSDVGGYNYVSWYQQHPGKAPKLMIYDVNNRPSEVSNRFSGSKSGNTASLTISGLQAEDEADYYCSSYTTGSRAVFGGGTKLTVLGSRGGGGSGGGGSGGGGSLEMAEVQLVQSGAEVKKPGESLTISCKASGYSFPNYWITWVRQMSGGGLEWMGRIDPGDSYTTYNPSFQGHVTISIDKSTNTAYLHWNSLKASDTAMYYCARYYVSLVDIWGQGTLVTVSSEQKLISEEDLAAATGTTTPAPRPPTPAPTIASQPLSLRPEACRPAAGGAVHTRGLDFACDIYIWAPLAGTCGVLLLSLVITLYCAAARSKRSRLLHSDYMNMTPRRPGPTRKHYQPYAPPRDFAAYRSRVKFSRSADAPAYQQGQNQLYNELNLGRREEYDVLDKRRGRDPEMGGKPRRKNPQEGLYNELQKDKMAEAYSEIGMKGERRRGKGHDGLYQGLSTATKDTYDALHMQALPPR

SEQ ID NO: 13 - protein, 555 aa, Artificial Sequence
  Description of Artificial Sequence: Synthetic polypeptide
METDTLLLWVLLLWVPGSTGQSVLTQPPSVSAAPGQRVTISCSGTRSNIGSDYVSWYQHLPGTAPKLLVYGDNLRPSGIPDRFSASKSGTSATLGITGLQTGDEADYYCGTWDYTLNGVVFGGGTKLTVLGSRGGGGSGGGGSGGGGSLEMAQVQLVESGGGLVQPGGSLRLSCAASGFTFSSYAMSWVRQAPGKGLEWVSVIYSGGSSTYYADSVKGRFTISRDNSKNTLYLQMNSLRAEDTAVYYCARTSYLNHGDYWGQGTLVTVSSEQKLISEEDLAAATGAPPLGTQPDCNPTPENGEAPASTSPTQSLLVDSQASKTLPIPTSAPVALSSTGKPVLDAGPVLFWVILVLVVVVGSSAFLLCHRRACRKRIRQKLHLCYPVQTSQPKLELVDSRPRRSSTQLRSGASVTEPVAEERGLMSQPLMETCHSVGAAYLESLPLQDASPAGGPSSPRDLPEPRVSTEHTNNKIEKIYIMKADTVIVGTVKAELPEGRGLAGPAEPELEEELEADHTPHYPEQETEPPLGSCSDVMLSVEEEGKEDPLPTAASGK

SEQ ID NO: 14 - protein, 390 aa, Artificial Sequence
  Description of Artificial Sequence: Synthetic polypeptide
METDTLLLWVLLLWVPGSTGQSVLTQPPSVSAAPGQRVTISCSGTRSNIGSDYVSWYQHLPGTAPKLLVYGDNLRPSGIPDRFSASKSGTSATLGITGLQTGDEADYYCGTWDYTLNGVVFGGGTKLTVLGSRGGGGSGGGGSGGGGSLEMAQVQLVESGGGLVQPGGSLRLSCAASGFTFSSYAMSWVRQAPGKGLEWVSVIYSGGSSTYYADSVKGRFTISRDNSKNTLYLQMNSLRAEDTAVYYCARTSYLNHGDYWGQGTLVTVSSEQKLISEEDLAAAIEVMYPPPYLDNEKSNGTIIHVKGKHLCPSPLFPGPSKPFWVLVVVGGVLACYSLLVTVAFIIFWVRSKRSRLLHSDYMNMTPRRPGPTRKHYQPYAPPRDFAAYRS

SEQ ID NO: 15 - protein, 379 aa, Artificial Sequence
  Description of Artificial Sequence: Synthetic polypeptide
METDTLLLWVLLLWVPGSTGQSVLTQPPSVSAAPGQRVTISCSGTRSNIGSDYVSWYQHLPGTAPKLLVYGDNLRPSGIPDRFSASKSGTSATLGITGLQTGDEADYYCGTWDYTLNGVVFGGGTKLTVLGSRGGGGSGGGGSGGGGSLEMAQVQLVESGGGLVQPGGSLRLSCAASGFTFSSYAMSWVRQAPGKGLEWVSVIYSGGSSTYYADSVKGRFTISRDNSKNTLYLQMNSLRAEDTAVYYCARTSYLNHGDYWGQGTLVTVSSEQKLISEEDLAAATGPADLSPGASSVTPPAPAREPGHSPQIISFFLALTSTALLFLLFFLTLRFSVVKRGRKKLLYIFKQPFMRPVQTTQEEDGCSCRFPEEEEGGCEL

SEQ ID NO: 16 - protein, 395 aa, Artificial Sequence
  Description of Artificial Sequence: Synthetic polypeptide
METDTLLLWVLLLWVPGSTGQSVLTQPPSVSAAPGQRVTISCSGTRSNIGSDYVSWYQHLPGTAPKLLVYGDNLRPSGIPDRFSASKSGTSATLGITGLQTGDEADYYCGTWDYTLNGVVFGGGTKLTVLGSRGGGGSGGGGSGGGGSLEMAQVQLVESGGGLVQPGGSLRLSCAASGFTFSSYAMSWVRQAPGKGLEWVSVIYSGGSSTYYADSVKGRFTISRDNSKNTLYLQMNSLRAEDTAVYYCARTSYLNHGDYWGQGTLVTVSSEQKLISEEDLAAATGDRDPPATQPQETQGPPARPITVQPTEAWPRTSQGPSTRPVEVPGGRAVAAILGLGLVLGLLGPLAILLALYLLRRDQRLPPDAHKPPGGGSFRTPIQEEQADAHSTLAKI

SEQ ID NO: 17 - protein, 404 aa, Artificial Sequence
  Description of Artificial Sequence: Synthetic polypeptide
METDTLLLWVLLLWVPGSTGQSVLTQPPSVSAAPGQRVTISCSGTRSNIGSDYVSWYQHLPGTAPKLLVYGDNLRPSGIPDRFSASKSGTSATLGITGLQTGDEADYYCGTWDYTLNGVVFGGGTKLTVLGSRGGGGSGGGGSGGGGSLEMAQVQLVESGGGLVQPGGSLRLSCAASGFTFSSYAMSWVRQAPGKGLEWVSVIYSGGSSTYYADSVKGRFTISRDNSKNTLYLQMNSLRAEDTAVYYCARTSYLNHGDYWGQGTLVTVSSEQKLISEEDLAAATGPTHLPYVSEMLEARTAGHMQTLADFRQLPARTLSTHWPPQRSLCSSDFIRILVIFSGMFLVFTLAGALFLHQRRKYRSNKGESPVEPAEPCRYSCPREEEGSTIPIQEDYRKPEPACSP

SEQ ID NO: 18 - protein, 408 aa, Artificial Sequence
  Description of Artificial Sequence: Synthetic polypeptide
METDTLLLWVLLLWVPGSTGQSVLTQPPSVSAAPGQRVTISCSGTRSNIGSDYVSWYQHLPGTAPKLLVYGDNLRPSGIPDRFSASKSGTSATLGITGLQTGDEADYYCGTWDYTLNGVVFGGGTKLTVLGSRGGGGSGGGGSGGGGSLEMAQVQLVESGGGLVQPGGSLRLSCAASGFTFSSYAMSWVRQAPGKGLEWVSVIYSGGSSTYYADSVKGRFTISRDNSKNTLYLQMNSLRAEDTAVYYCARTSYLNHGDYWGQGTLVTVSSEQKLISEEDLAAATGAPPLGTQPDCNPTPENGEAPASTSPTQSLLVDSQASKTLPIPTSAPVALSSTGKPVLDAGPVLFWVILVLVVVVGSSAFLLCRSKRSRLLHSDYMNMTPRRPGPTRKHYQPYAPPRDFAAYRS

SEQ ID NO: 19 - protein, 409 aa, Artificial Sequence
  Description of Artificial Sequence: Synthetic polypeptide
METDTLLLWVLLLWVPGSTGQSVLTQPPSVSAAPGQRVTISCSGTRSNIGSDYVSWYQHLPGTAPKLLVYGDNLRPSGIPDRFSASKSGTSATLGITGLQTGDEADYYCGTWDYTLNGVVFGGGTKLTVLGSRGGGGSGGGGSGGGGSLEMAQVQLVESGGGLVQPGGSLRLSCAASGFTFSSYAMSWVRQAPGKGLEWVSVIYSGGSSTYYADSVKGRFTISRDNSKNTLYLQMNSLRAEDTAVYYCARTSYLNHGDYWGQGTLVTVSSEQKLISEEDLAAATGAPPLGTQPDCNPTPENGEAPASTSPTQSLLVDSQASKTLPIPTSAPVALSSTGKPVLDAGPVLFWVILVLVVVVGSSAFLLCKRGRKKLLYIFKQPFMRPVQTTQEEDGCSCRFPEEEEGGCEL

SEQ ID NO: 20 - protein, 409 aa, Artificial Sequence
  Description of Artificial Sequence: Synthetic polypeptide
METDTLLLWVLLLWVPGSTGQSVLTQPPSVSAAPGQRVTISCSGTRSNIGSDYVSWYQHLPGTAPKLLVYGDNLRPSGIPDRFSASKSGTSATLGITGLQTGDEADYYCGTWDYTLNGVVFGGGTKLTVLGSRGGGGSGGGGSGGGGSLEMAQVQLVESGGGLVQPGGSLRLSCAASGFTFSSYAMSWVRQAPGKGLEWVSVIYSGGSSTYYADSVKGRFTISRDNSKNTLYLQMNSLRAEDTAVYYCARTSYLNHGDYWGQGTLVTVSSEQKLISEEDLAAATGAPPLGTQPDCNPTPENGEAPASTSPTQSLLVDSQASKTLPIPTSAPVALSSTGKPVLDAGPVLFWVILVLVVVVGSSAFLLCALYLLRRDQRLPPDAHKPPGGGSFRTPIQEEQADAHSTLAKI

SEQ ID NO: 21 - protein, 415 aa, Artificial Sequence
  Description of Artificial Sequence: Synthetic polypeptide
METDTLLLWVLLLWVPGSTGQSVLTQPPSVSAAPGQRVTISCSGTRSNIGSDYVSWYQHLPGTAPKLLVYGDNLRPSGIPDRFSASKSGTSATLGITGLQTGDEADYYCGTWDYTLNGVVFGGGTKLTVLGSRGGGGSGGGGSGGGGSLEMAQVQLVESGGGLVQPGGSLRLSCAASGFTFSSYAMSWVRQAPGKGLEWVSVIYSGGSSTYYADSVKGRFTISRDNSKNTLYLQMNSLRAEDTAVYYCARTSYLNHGDYWGQGTLVTVSSEQKLISEEDLAAATGAPPLGTQPDCNPTPENGEAPASTSPTQSLLVDSQASKTLPIPTSAPVALSSTGKPVLDAGPVLFWVILVLVVVVGSSAFLLCQRRKYRSNKGESPVEPAEPCRYSCPREEEGSTIPIQEDYRKPEPACSP

SEQ ID NO: 22 - protein, 539 aa, Artificial Sequence
  Description of Artificial Sequence: Synthetic polypeptide
METDTLLLWVLLLWVPGSTGQSVLTQPPSVSAAPGQRVTISCSGTRSNIGSDYVSWYQHLPGTAPKLLVYGDNLRPSGIPDRFSASKSGTSATLGITGLQTGDEADYYCGTWDYTLNGVVFGGGTKLTVLGSRGGGGSGGGGSGGGGSLEMAQVQLVESGGGLVQPGGSLRLSCAASGFTFSSYAMSWVRQAPGKGLEWVSVIYSGGSSTYYADSVKGRFTISRDNSKNTLYLQMNSLRAEDTAVYYCARTSYLNHGDYWGQGTLVTVSSEQKLISEEDLAAATGIEVMYPPPYLDNEKSNGTIIHVKGKHLCPSPLFPGPSKPFWVLVVVGGVLACYSLLVTVAFIIFWVHRRACRKRIRQKLHLCYPVQTSQPKLELVDSRPRRSSTQLRSGASVTEPVAEERGLMSQPLMETCHSVGAAYLESLPLQDASPAGGPSSPRDLPEPRVSTEHTNNKIEKIYIMKADTVIVGTVKAELPEGRGLAGPAEPELEEELEADHTPHYPEQETEPPLGSCSDVMLSVEEEGKEDPLPTAASGK

SEQ ID NO: 23 - protein, 393 aa, Artificial Sequence
  Description of Artificial Sequence: Synthetic polypeptide
METDTLLLWVLLLWVPGSTGQSVLTQPPSVSAAPGQRVTISCSGTRSNIGSDYVSWYQHLPGTAPKLLVYGDNLRPSGIPDRFSASKSGTSATLGITGLQTGDEADYYCGTWDYTLNGVVFGGGTKLTVLGSRGGGGSGGGGSGGGGSLEMAQVQLVESGGGLVQPGGSLRLSCAASGFTFSSYAMSWVRQAPGKGLEWVSVIYSGGSSTYYADSVKGRFTISRDNSKNTLYLQMNSLRAEDTAVYYCARTSYLNHGDYWGQGTLVTVSSEQKLISEEDLAAATGIEVMYPPPYLDNEKSNGTIIHVKGKHLCPSPLFPGPSKPFWVLVVVGGVLACYSLLVTVAFIIFWVKRGRKKLLYIFKQPFMRPVQTTQEEDGCSCRFPEEEEGGCEL

SEQ ID NO: 24 - protein, 393 aa, Artificial Sequence
  Description of Artificial Sequence: Synthetic polypeptide
METDTLLLWVLLLWVPGSTGQSVLTQPPSVSAAPGQRVTISCSGTRSNIGSDYVSWYQHLPGTAPKLLVYGDNLRPSGIPDRFSASKSGTSATLGITGLQTGDEADYYCGTWDYTLNGVVFGGGTKLTVLGSRGGGGSGGGGSGGGGSLEMAQVQLVESGGGLVQPGGSLRLSCAASGFTFSSYAMSWVRQAPGKGLEWVSVIYSGGSSTYYADSVKGRFTISRDNSKNTLYLQMNSLRAEDTAVYYCARTSYLNHGDYWGQGTLVTVSSEQKLISEEDLAAATGIEVMYPPPYLDNEKSNGTIIHVKGKHLCPSPLFPGPSKPFWVLVVVGGVLACYSLLVTVAFIIFWVALYLLRRDQRLPPDAHKPPGGGSFRTPIQEEQADAHSTLAKI

SEQ ID NO: 25 - protein, 399 aa, Artificial Sequence
  Description of Artificial Sequence: Synthetic polypeptide
METDTLLLWVLLLWVPGSTGQSVLTQPPSVSAAPGQRVTISCSGTRSNIGSDYVSWYQHLPGTAPKLLVYGDNLRPSGIPDRFSASKSGTSATLGITGLQTGDEADYYCGTWDYTLNGVVFGGGTKLTVLGSRGGGGSGGGGSGGGGSLEMAQVQLVESGGGLVQPGGSLRLSCAASGFTFSSYAMSWVRQAPGKGLEWVSVIYSGGSSTYYADSVKGRFTISRDNSKNTLYLQMNSLRAEDTAVYYCARTSYLNHGDYWGQGTLVTVSSEQKLISEEDLAAATGIEVMYPPPYLDNEKSNGTIIHVKGKHLCPSPLFPGPSKPFWVLVVVGGVLACYSLLVTVAFIIFWVQRRKYRSNKGESPVEPAEPCRYSCPREEEGSTIPIQEDYRKPEPACSP

SEQ ID NO: 26 - protein, 525 aa, Artificial Sequence
  Description of Artificial Sequence: Synthetic polypeptide
METDTLLLWVLLLWVPGSTGQSVLTQPPSVSAAPGQRVTISCSGTRSNIGSDYVSWYQHLPGTAPKLLVYGDNLRPSGIPDRFSASKSGTSATLGITGLQTGDEADYYCGTWDYTLNGVVFGGGTKLTVLGSRGGGGSGGGGSGGGGSLEMAQVQLVESGGGLVQPGGSLRLSCAASGFTFSSYAMSWVRQAPGKGLEWVSVIYSGGSSTYYADSVKGRFTISRDNSKNTLYLQMNSLRAEDTAVYYCARTSYLNHGDYWGQGTLVTVSSEQKLISEEDLAAATGPADLSPGASSVTPPAPAREPGHSPQIISFFLALTSTALLFLLFFLTLRFSVVHRRACRKRIRQKLHLCYPVQTSQPKLELVDSRPRRSSTQLRSGASVTEPVAEERGLMSQPLMETCHSVGAAYLESLPLQDASPAGGPSSPRDLPEPRVSTEHTNNKIEKIYIMKADTVIVGTVKAELPEGRGLAGPAEPELEEELEADHTPHYPEQETEPPLGSCSDVMLSVEEEGKEDPLPTAASGK

SEQ ID NO: 27 - protein, 378 aa, Artificial Sequence
  Description of Artificial Sequence: Synthetic polypeptide
METDTLLLWVLLLWVPGSTGQSVLTQPPSVSAAPGQRVTISCSGTRSNIGSDYVSWYQHLPGTAPKLLVYGDNLRPSGIPDRFSASKSGTSATLGITGLQTGDEADYYCGTWDYTLNGVVFGGGTKLTVLGSRGGGGSGGGGSGGGGSLEMAQVQLVESGGGLVQPGGSLRLSCAASGFTFSSYAMSWVRQAPGKGLEWVSVIYSGGSSTYYADSVKGRFTISRDNSKNTLYLQMNSLRAEDTAVYYCARTSYLNHGDYWGQGTLVTVSSEQKLISEEDLAAATGPADLSPGASSVTPPAPAREPGHSPQIISFFLALTSTALLFLLFFLTLRFSVVRSKRSRLLHSDYMNMTPRRPGPTRKHYQPYAPPRDFAAYRS

SEQ ID NO: 28 - protein, 379 aa, Artificial Sequence
  Description of Artificial Sequence: Synthetic polypeptide
METDTLLLWVLLLWVPGSTGQSVLTQPPSVSAAPGQRVTISCSGTRSNIGSDYVSWYQHLPGTAPKLLVYGDNLRPSGIPDRFSASKSGTSATLGITGLQTGDEADYYCGTWDYTLNGVVFGGGTKLTVLGSRGGGGSGGGGSGGGGSLEMAQVQLVESGGGLVQPGGSLRLSCAASGFTFSSYAMSWVRQAPGKGLEWVSVIYSGGSSTYYADSVKGRFTISRDNSKNTLYLQMNSLRAEDTAVYYCARTSYLNHGDYWGQGTLVTVSSEQKLISEEDLAAATGPADLSPGASSVTPPAPAREPGHSPQIISFFLALTSTALLFLLFFLTLRFSVVALYLLRRDQRLPPDAHKPPGGGSFRTPIQEEQADAHSTLAKI

SEQ ID NO: 29 - protein, 385 aa, Artificial Sequence
  Description of Artificial Sequence: Synthetic polypeptide
METDTLLLWVLLLWVPGSTGQSVLTQPPSVSAAPGQRVTISCSGTRSNIGSDYVSWYQHLPGTAPKLLVYGDNLRPSGIPDRFSASKSGTSATLGITGLQTGDEADYYCGTWDYTLNGVVFGGGTKLTVLGSRGGGGSGGGGSGGGGSLEMAQVQLVESGGGLVQPGGSLRLSCAASGFTFSSYAMSWVRQAPGKGLEWVSVIYSGGSSTYYADSVKGRFTISRDNSKNTLYLQMNSLRAEDTAVYYCARTSYLNHGDYWGQGTLVTVSSEQKLISEEDLAAATGPADLSPGASSVTPPAPAREPGHSPQIISFFLALTSTALLFLLFFLTLRFSVVQRRKYRSNKGESPVEPAEPCRYSCPREEEGSTIPIQEDYRKPEPACSP

SEQ ID NO: 30 - protein, 541 aa, Artificial Sequence
  Description of Artificial Sequence: Synthetic polypeptide
METDTLLLWVLLLWVPGSTGQSVLTQPPSVSAAPGQRVTISCSGTRSNIGSDYVSWYQHLPGTAPKLLVYGDNLRPSGIPDRFSASKSGTSATLGITGLQTGDEADYYCGTWDYTLNGVVFGGGTKLTVLGSRGGGGSGGGGSGGGGSLEMAQVQLVESGGGLVQPGGSLRLSCAASGFTFSSYAMSWVRQAPGKGLEWVSVIYSGGSSTYYADSVKGRFTISRDNSKNTLYLQMNSLRAEDTAVYYCARTSYLNHGDYWGQGTLVTVSSEQKLISEEDLAAATGDRDPPATQPQETQGPPARPITVQPTEAWPRTSQGPSTRPVEVPGGRAVAAILGLGLVLGLLGPLAILLHRRACRKRIRQKLHLCYPVQTSQPKLELVDSRPRRSSTQLRSGASVTEPVAEERGLMSQPLMETCHSVGAAYLESLPLQDASPAGGPSSPRDLPEPRVSTEHTNNKIEKIYIMKADTVIVGTVKAELPEGRGLAGPAEPELEEELEADHTPHYPEQETEPPLGSCSDVMLSVEEEGKEDPLPTAASGK

SEQ ID NO: 31 - protein, 394 aa, Artificial Sequence
  Description of Artificial Sequence: Synthetic polypeptide
METDTLLLWVLLLWVPGSTGQSVLTQPPSVSAAPGQRVTISCSGTRSNIGSDYVSWYQHLPGTAPKLLVYGDNLRPSGIPDRFSASKSGTSATLGITGLQTGDEADYYCGTWDYTLNGVVFGGGTKLTVLGSRGGGGSGGGGSGGGGSLEMAQVQLVESGGGLVQPGGSLRLSCAASGFTFSSYAMSWVRQAPGKGLEWVSVIYSGGSSTYYADSVKGRFTISRDNSKNTLYLQMNSLRAEDTAVYYCARTSYLNHGDYWGQGTLVTVSSEQKLISEEDLAAATGDRDPPATQPQETQGPPARPITVQPTEAWPRTSQGPSTRPVEVPGGRAVAAILGLGLVLGLLGPLAILLRSKRSRLLHSDYMNMTPRRPGPTRKHYQPYAPPRDFAAYRS

SEQ ID NO: 32 - protein, 395 aa, Artificial Sequence
  Description of Artificial Sequence: Synthetic polypeptide
METDTLLLWVLLLWVPGSTGQSVLTQPPSVSAAPGQRVTISCSGTRSNIGSDYVSWYQHLPGTAPKLLVYGDNLRPSGIPDRFSASKSGTSATLGITGLQTGDEADYYCGTWDYTLNGVVFGGGTKLTVLGSRGGGGSGGGGSGGGGSLEMAQVQLVESGGGLVQPGGSLRLSCAASGFTFSSYAMSWVRQAPGKGLEWVSVIYSGGSSTYYADSVKGRFTISRDNSKNTLYLQMNSLRAEDTAVYYCARTSYLNHGDYWGQGTLVTVSSEQKLISEEDLAAATGDRDPPATQPQETQGPPARPITVQPTEAWPRTSQGPSTRPVEVPGGRAVAAILGLGLVLGLLGPLAILLKRGRKKLLYIFKQPFMRPVQTTQEEDGCSCRFPEEEEGGCEL

SEQ ID NO: 33 - protein, 401 aa, Artificial Sequence
  Description of Artificial Sequence: Synthetic polypeptide
METDTLLLWVLLLWVPGSTGQSVLTQPPSVSAAPGQRVTISCSGTRSNIGSDYVSWYQHLPGTAPKLLVYGDNLRPSGIPDRFSASKSGTSATLGITGLQTGDEADYYCGTWDYTLNGVVFGGGTKLTVLGSRGGGGSGGGGSGGGGSLEMAQVQLVESGGGLVQPGGSLRLSCAASGFTFSSYAMSWVRQAPGKGLEWVSVIYSGGSSTYYADSVKGRFTISRDNSKNTLYLQMNSLRAEDTAVYYCARTSYLNHGDYWGQGTLVTVSSEQKLISEEDLAAATGDRDPPATQPQETQGPPARPITVQPTEAWPRTSQGPSTRPVEVPGGRAVAAILGLGLVLGLLGPLAILLQRRKYRSNKGESPVEPAEPCRYSCPREEEGSTIPIQEDYRKPEPACSP

SEQ ID NO: 34 - protein, 544 aa, Artificial Sequence
  Description of Artificial Sequence: Synthetic polypeptide
METDTLLLWVLLLWVPGSTGQSVLTQPPSVSAAPGQRVTISCSGTRSNIGSDYVSWYQHLPGTAPKLLVYGDNLRPSGIPDRFSASKSGTSATLGITGLQTGDEADYYCGTWDYTLNGVVFGGGTKLTVLGSRGGGGSGGGGSGGGGSLEMAQVQLVESGGGLVQPGGSLRLSCAASGFTFSSYAMSWVRQAPGKGLEWVSVIYSGGSSTYYADSVKGRFTISRDNSKNTLYLQMNSLRAEDTAVYYCARTSYLNHGDYWGQGTLVTVSSEQKLISEEDLAAATGPTHLPYVSEMLEARTAGHMQTLADFRQLPARTLSTHWPPQRSLCSSDFIRILVIFSGMFLVFTLAGALFLHHRRACRKRIRQKLHLCYPVQTSQPKLELVDSRPRRSSTQLRSGASVTEPVAEERGLMSQPLMETCHSVGAAYLESLPLQDASPAGGPSSPRDLPEPRVSTEHTNNKIEKIYIMKADTVIVGTVKAELPEGRGLAGPAEPELEEELEADHTPHYPEQETEPPLGSCSDVMLSVEEEGKEDPLPTAASGK

SEQ ID NO: 35 - protein, 397 aa, Artificial Sequence
  Description of Artificial Sequence: Synthetic polypeptide
METDTLLLWVLLLWVPGSTGQSVLTQPPSVSAAPGQRVTISCSGTRSNIGSDYVSWYQHLPGTAPKLLVYGDNLRPSGIPDRFSASKSGTSATLGITGLQTGDEADYYCGTWDYTLNGVVFGGGTKLTVLGSRGGGGSGGGGSGGGGSLEMAQVQLVESGGGLVQPGGSLRLSCAASGFTFSSYAMSWVRQAPGKGLEWVSVIYSGGSSTYYADSVKGRFTISRDNSKNTLYLQMNSLRAEDTAVYYCARTSYLNHGDYWGQGTLVTVSSEQKLISEEDLAAATGPTHLPYVSEMLEARTAGHMQTLADFRQLPARTLSTHWPPQRSLCSSDFIRILVIFSGMFLVFTLAGALFLHRSKRSRLLHSDYMNMTPRRPGPTRKHYQPYAPPRDFAAYRS

SEQ ID NO: 36 - protein, 398 aa, Artificial Sequence
  Description of Artificial Sequence: Synthetic polypeptide
METDTLLLWVLLLWVPGSTGQSVLTQPPSVSAAPGQRVTISCSGTRSNIGSDYVSWYQHLPGTAPKLLVYGDNLRPSGIPDRFSASKSGTSATLGITGLQTGDEADYYCGTWDYTLNGVVFGGGTKLTVLGSRGGGGSGGGGSGGGGSLEMAQVQLVESGGGLVQPGGSLRLSCAASGFTFSSYAMSWVRQAPGKGLEWVSVIYSGGSSTYYADSVKGRFTISRDNSKNTLYLQMNSLRAEDTAVYYCARTSYLNHGDYWGQGTLVTVSSEQKLISEEDLAAATGPTHLPYVSEMLEARTAGHMQTLADFRQLPARTLSTHWPPQRSLCSSDFIRILVIFSGMFLVFTLAGALFLHKRGRKKLLYIFKQPFMRPVQTTQEEDGCSCRFPEEEEGGCEL

SEQ ID NO: 37 - protein, 398 aa, Artificial Sequence
  Description of Artificial Sequence: Synthetic polypeptide
METDTLLLWVLLLWVPGSTGQSVLTQPPSVSAAPGQRVTISCSGTRSNIGSDYVSWYQHLPGTAPKLLVYGDNLRPSGIPDRFSASKSGTSATLGITGLQTGDEADYYCGTWDYTLNGVVFGGGTKLTVLGSRGGGGSGGGGSGGGGSLEMAQVQLVESGGGLVQPGGSLRLSCAASGFTFSSYAMSWVRQAPGKGLEWVSVIYSGGSSTYYADSVKGRFTISRDNSKNTLYLQMNSLRAEDTAVYYCARTSYLNHGDYWGQGTLVTVSSEQKLISEEDLAAATGPTHLPYVSEMLEARTAGHMQTLADFRQLPARTLSTHWPPQRSLCSSDFIRILVIFSGMFLVFTLAGALFLHALYLLRRDQRLPPDAHKPPGGGSFRTPIQEEQADAHSTLAKI

SEQ ID NO: 38 - protein, 542 aa, Artificial Sequence
  Description of Artificial Sequence: Synthetic polypeptide
METDTLLLWVLLLWVPGSTGQSVLTQPPSVSAAPGQRVTISCSGTRSNIGSDYVSWYQHLPGTAPKLLVYGDNLRPSGIPDRFSASKSGTSATLGITGLQTGDEADYYCGTWDYTLNGVVFGGGTKLTVLGSRGGGGSGGGGSGGGGSLEMAQVQLVESGGGLVQPGGSLRLSCAASGFTFSSYAMSWVRQAPGKGLEWVSVIYSGGSSTYYADSVKGRFTISRDNSKNTLYLQMNSLRAEDTAVYYCARTSYLNHGDYWGQGTLVTVSSEQKLISEEDLAAATGTTTPAPRPPTPAPTIASQPLSLRPEACRPAAGGAVHTRGLDFACDIYIWAPLAGTCGVLLLSLVITLYCHRRACRKRIRQKLHLCYPVQTSQPKLELVDSRPRRSSTQLRSGASVTEPVAEERGLMSQPLMETCHSVGAAYLESLPLQDASPAGGPSSPRDLPEPRVSTEHTNNKIEKIYIMKADTVIVGTVKAELPEGRGLAGPAEPELEEELEADHTPHYPEQETEPPLGSCSDVMLSVEEEGKEDPLPTAASGK

SEQ ID NO: 39 - protein, 395 aa, Artificial Sequence
  Description of Artificial Sequence: Synthetic polypeptide
METDTLLLWVLLLWVPGSTGQSVLTQPPSVSAAPGQRVTISCSGTRSNIGSDYVSWYQHLPGTAPKLLVYGDNLRPSGIPDRFSASKSGTSATLGITGLQTGDEADYYCGTWDYTLNGVVFGGGTKLTVLGSRGGGGSGGGGSGGGGSLEMAQVQLVESGGGLVQPGGSLRLSCAASGFTFSSYAMSWVRQAPGKGLEWVSVIYSGGSSTYYADSVKGRFTISRDNSKNTLYLQMNSLRAEDTAVYYCARTSYLNHGDYWGQGTLVTVSSEQKLISEEDLAAATGTTTPAPRPPTPAPTIASQPLSLRPEACRPAAGGAVHTRGLDFACDIYIWAPLAGTCGVLLLSLVITLYCRSKRSRLLHSDYMNMTPRRPGPTRKHYQPYAPPRDFAAYRS

SEQ ID NO: 40 - protein, 396 aa, Artificial Sequence
  Description of Artificial Sequence: Synthetic polypeptide
METDTLLLWVLLLWVPGSTGQSVLTQPPSVSAAPGQRVTISCSGTRSNIGSDYVSWYQHLPGTAPKLLVYGDNLRPSGIPDRFSASKSGTSATLGITGLQTGDEADYYCGTWDYTLNGVVFGGGTKLTVLGSRGGGGSGGGGSGGGGSLEMAQVQLVESGGGLVQPGGSLRLSCAASGFTFSSYAMSWVRQAPGKGLEWVSVIYSGGSSTYYADSVKGRFTISRDNSKNTLYLQMNSLRAEDTAVYYCARTSYLNHGDYWGQGTLVTVSSEQKLISEEDLAAATGTTTPAPRPPTPAPTIASQPLSLRPEACRPAAGGAVHTRGLDFACDIYIWAPLAGTCGVLLLSLVITLYCKRGRKKLLYIFKQPFMRPVQTTQEEDGCSCRFPEEEEGGCEL

SEQ ID NO: 41 - protein, 396 aa, Artificial Sequence
  Description of Artificial Sequence: Synthetic polypeptide
METDTLLLWVLLLWVPGSTGQSVLTQPPSVSAAPGQRVTISCSGTRSNIGSDYVSWYQHLPGTAPKLLVYGDNLRPSGIPDRFSASKSGTSATLGITGLQTGDEADYYCGTWDYTLNGVVFGGGTKLTVLGSRGGGGSGGGGSGGGGSLEMAQVQLVESGGGLVQPGGSLRLSCAASGFTFSSYAMSWVRQAPGKGLEWVSVIYSGGSSTYYADSVKGRFTISRDNSKNTLYLQMNSLRAEDTAVYYCARTSYLNHGDYWGQGTLVTVSSEQKLISEEDLAAATGTTTPAPRPPTPAPTIASQPLSLRPEACRPAAGGAVHTRGLDFACDIYIWAPLAGTCGVLLLSLVITLYCALYLLRRDQRLPPDAHKPPGGGSFRTPIQEEQADAHSTLAKI

SEQ ID NO: 42 - protein, 402 aa, Artificial Sequence
  Description of Artificial Sequence: Synthetic polypeptide
METDTLLLWVLLLWVPGSTGQSVLTQPPSVSAAPGQRVTISCSGTRSNIGSDYVSWYQHLPGTAPKLLVYGDNLRPSGIPDRFSASKSGTSATLGITGLQTGDEADYYCGTWDYTLNGVVFGGGTKLTVLGSRGGGGSGGGGSGGGGSLEMAQVQLVESGGGLVQPGGSLRLSCAASGFTFSSYAMSWVRQAPGKGLEWVSVIYSGGSSTYYADSVKGRFTISRDNSKNTLYLQMNSLRAEDTAVYYCARTSYLNHGDYWGQGTLVTVSSEQKLISEEDLAAATGTTTPAPRPPTPAPTIASQPLSLRPEACRPAAGGAVHTRGLDFACDIYIWAPLAGTCGVLLLSLVITLYCQRRKYRSNKGESPVEPAEPCRYSCPREEEGSTIPIQEDYRKPEPACSP

SEQ ID NO: 43 - protein, 247 aa, Artificial Sequence
  Description of Artificial Sequence: Synthetic polypeptide
QPVLTQPPSVSVAPGKTARITCGGNNIGSKSVHWYQQKPGQAPVLVIYYDSDRPSGIPERFSGSNSGNTATLTISRVEAGDEADYYCQVWDSSSDHYVFGTGTKVTVLGSRGGGGSGGGGSGGGGSLEMAQVQLVQSGAEVKKPGASVKVSCKASGYTFTSYYMHWVRQAPGQGLEWMGIINPSGGSTSYAQKFQGRVTMTRDTSTSTVYMELSSLRSEDTAVYYCARWHGGPYDYWGQGTLVTVSS

SEQ ID NO: 44 - protein, 249 aa, Artificial Sequence
  Description of Artificial Sequence: Synthetic polypeptide
QSVLTQPPSVSVAPGKTARITCGGNNIGSKSVHWYQQKPGQAPVLVVYDDSDRPSGIPERFSGSNSGNTATLTISRVEAGDEADYYCQVWDSSSDHVFGTGTKVTVLGSRGGGGSGGGGSGGGGSLEMAQVQLVQSGADVRKPGASVKVSCKASGYTFASHGISWVRQAPGQGLEWLGWISPYTGNTNYAQKFQGRVTMATDTSTSTAYMELRSLRSDDTAIYYCARGKRTLASCFDYWGQGTLVTVSS

SEQ ID NO: 45 - protein, 260 aa, Artificial Sequence
  Description of Artificial Sequence: Synthetic polypeptide
LPVLTQPPSVSVAPGKTARITCGGNNIGSKSVHWYQQKPGQAPVLVVYDDSDRPSGIPERFSGSNSGNTATLTISRVEAGDEADYYCQVWDSSSDYVVFGGGTKLTVLGSRGGGGSGGGGSGGGGSLEMAEVQLVQSGAEVKKPGESLKISCKGSGYSFTSYWIGWVRQMPGKGLEWMGIIYPGDSDTRYSPSFQGQVTISADKSISTAYLQWSSLKASDTAMYYCARQVWGWQGGMYPRSNWWYNLDSWGQGTLVTVSS

SEQ ID NO: 46 - protein, 247 aa, Artificial Sequence
  Description of Artificial Sequence: Synthetic polypeptide
QIVLSQSPAILSASPGEKVTMTCRASSSVSYIHWFQQKPGSSPKPWIYATSNLASGVPVRFSGSGSGTSYSLTISRVEAEDAATYYCQQWTSNPPTFGGGTKLEIKRSRGGGGSGGGGSGGGGSLEQVQLQQPGAELVKPGASVKMSCKASGYTFTSYNMHWVKQTPGRGLEWIGAIYPGNGDTSYNQKFKGKATLTADKSSSTAYMQLSSLTSEDSAVYYCARSTYYGGDWYFNVWGAGTTVTVSS

SEQ ID NO: 47 - protein, 247 aa, Artificial Sequence
  Description of Artificial Sequence: Synthetic polypeptide
DIQLTQSPSSLSTSVGDRVTITCQASHDIRNYLNWYQQKPGKAPNLLIYAASNLQTGVPSRFSGRGSGTDFTLTISSLQPEDIATYYCQQYDGLPLTFGQGTRLEIKRSRGGGGSGGGGSGGGGSLEMAQVQLVESGGGLVQPGGSLRLSCAASGFTFSNYAMSWVRQAPGKGLEWVSSISGSGGSTYYADSVKGRFTISRDTSKNTLYLQMNSLRAEDTAVYYCARYGSAAWMDSWGQGTLVTVSS

SEQ ID NO: 48 - protein, 517 aa, Artificial Sequence
  Description of Artificial Sequence: Synthetic polypeptide
DIQLTQSPSSLSTSVGDRVTITCQASHDIRNYLNWYQQKPGKAPNLLIYAASNLQTGVPSRFSGRGSGTDFTLTISSLQPEDIATYYCQQYDGLPLTFGQGTRLEIKRSRGGGGSGGGGSGGGGSLEMAQVQLVESGGGLVQPGGSLRLSCAASGFTFSNYAMSWVRQAPGKGLEWVSSISGSGGSTYYADSVKGRFTISRDTSKNTLYLQMNSLRAEDTAVYYCARYGSAAWMDSWGQGTLVTVSSGGGGSGGGGSLPVLTQPPSVSVAPGKTARITCGGNNIGSKSVHWYQQKPGQAPVLVVYDDSDRPSGIPERFSGSNSGNTATLTISRVEAGDEADYYCQVWDSSSDYVVFGGGTKLTVLGSRGGGGSGGGGSGGGGSLEMAEVQLVQSGAEVKKPGESLKISCKGSGYSFTSYWIGWVRQMPGKGLEWMGIIYPGDSDTRYSPSFQGQVTISADKSISTAYLQWSSLKASDTAMYYCARQVWGWQGGMYPRSNWWYNLDSWGQGTLVTVSS

SEQ ID NO: 49 - protein, 774 aa, Artificial Sequence
  Description of Artificial Sequence: Synthetic polypeptide
LPVLTQPPSVSVAPGKTARITCGGNNIGSKSVHWYQQKPGQAPVLVVYDDSDRPSGIPERFSGSNSGNTATLTISRVEAGDEADYYCQVWDSSSDYVVFGGGTKLTVLGSRGGGGSGGGGSGGGGSLEMAEVQLVQSGAEVKKPGESLKISCKGSGYSFTSYWIGWVRQMPGKGLEWMGIIYPGDSDTRYSPSFQGQVTISADKSISTAYLQWSSLKASDTAMYYCARQVWGWQGGMYPRSNWWYNLDSWGQGTLVTVSSGGGGSGGGGSDIQLTQSPSSLSTSVGDRVTITCQASHDIRNYLNWYQQKPGKAPNLLIYAASNLQTGVPSRFSGRGSGTDFTLTISSLQPEDIATYYCQQYDGLPLTFGQGTRLEIKRSRGGGGSGGGGSGGGGSLEMAQVQLVESGGGLVQPGGSLRLSCAASGFTFSNYAMSWVRQAPGKGLEWVSSISGSGGSTYYADSVKGRFTISRDTSKNTLYLQMNSLRAEDTAVYYCARYGSAAWMDSWGQGTLVTVSSGGGGSGGGGSQIVLSQSPAILSASPGEKVTMTCRASSSVSYIHWFQQKPGSSPKPWIYATSNLASGVPVRFSGSGSGTSYSLTISRVEAEDAATYYCQQWTSNPPTFGGGTKLEIKRSRGGGGSGGGGSGGGGSLEQVQLQQPGAELVKPGASVKMSCKASGYTFTSYNMHWVKQTPGRGLEWIGAIYPGNGDTSYNQKFKGKATLTADKSSSTAYMQLSSLTSEDSAVYYCARSTYYGGDWYFNVWGAGTTVTVSS

SEQ ID NO: 50 - protein, 245 aa, Artificial Sequence
  Description of Artificial Sequence: Synthetic polypeptide
EIVLTQSPGTLSLSPGERATLSCRASQSVSSSYLAWYQQKPGQAPRLLIYGASSRATGIPDRFSGSGSGTDFTLTISRLEPEDFAVYYCQQYGSSFGPGTKVDIKRSRGGGGSGGGGSGGGGSLEMAQVQLVQSGTEVKKPGSSVKVSCQASGGSLSSHGVSWLRQAPGQGLEWVGRIIPMFGVTDYAQKFQDRVTITADKSTSTVYMELISLGSDDTAVYFCARESRGATFEYWGQGTLVTVSS

SEQ ID NO: 51 - protein, 251 aa, Artificial Sequence
  Description of Artificial Sequence: Synthetic polypeptide
QSVLTQPASVSGSPGQSITISCTGTSSDFGDYDYVSWYQQHPGKAPKLMIYDVSDRPSGVSNRFSGSKSGNTASLTISGLQAEDEADYFCSSLTTSSTLVFGGGTKLTVLGSRGGGGSGGGGSGGGGSLEMAQLQLQESGPGLVKPSETLSLTCTVSGGSISSSSYYWGWIRQPPGKGLEWIGSIYYSGSTYYNPSLKSRVTISVDTSKNQFSLKLGSVTAADTAVYYCARHDGTDAFDIWGQGTTVTVSS

SEQ ID NO: 52 - protein, 254 aa, Artificial Sequence
  Description of Artificial Sequence: Synthetic polypeptide
QSVLTQPPSVSGAPGQRVTISCTGSSSNIGAGYDVHWYQQLPGTAPKLLIYGNSNRPSGVPDRFSGSKSGTSASLAITGLQAEDEADYYCQSYDSSLSGYVFGTGTKVTVLGSRGGGGSGGGGSGGGGSLEMAEVQLVQSGAEVKKPGESLKISCKGSGYSFTSYWIGWVRQMPGKGLEWMGIIYPGDSDTRYSPSFQGQVTISADKSISTAYLQWSSLKASDTAMYYCARSMGSSLYASSDVWGQGTLVTVSS

SEQ ID NO: 53 - protein, 249 aa, Artificial Sequence
  Description of Artificial Sequence: Synthetic polypeptide
QAVLTQPPSASGTPGQRVTISCSGSSSNIGSNTVNWYQQLPGTAPKLLMYSNNQRPSGVPDRFSGSKSGTSASLAISGLQSEDEADYYCAAWDDSLNGYVFGTGTKVTVLGSRGGGGSGGGGSGGGGSLEMAEVQLVQSGAEMKKPGESLKISCKGSGYNFASYWVGWVRQMPGKGLEWMGTIYPDDSDTRYGPAFQGQVTISADKSISTAYLQWSSLKASDTAMYYCARDSYYGIDVWGQGTLVTVSS

SEQ ID NO: 54 - protein, 248 aa, Artificial Sequence
  Description of Artificial Sequence: Synthetic polypeptide
DILLTQSPVILSVSPGERVSFSCRASQSIGTNIHWYQQRTNGSPRLLIKYASESISGIPSRFSGSGSGTDFTLSINSVESEDIADYYCQQNNNWPTTFGAGTKLELKRSRGGGGSGGGGSGGGGSLEMAQVQLKQSGPGLVQPSQSLSITCTVSGFSLTNYGVHWVRQSPGKGLEWLGVIWSGGNTDYNTPFTSRLSINKDNSKSQVFFKMNSLQSNDTAIYYCARALTYYDYEFAYWGQGTLVTVSS

SEQ ID NO: 55 - protein, 270 aa, Homo sapiens
APPLGTQPDCNPTPENGEAPASTSPTQSLLVDSQASKTLPIPTSAPVALSSTGKPVLDAGPVLFWVILVLVVVVGSSAFLLCHRRACRKRIRQKLHLCYPVQTSQPKLELVDSRPRRSSTQLRSGASVTEPVAEERGLMSQPLMETCHSVGAAYLESLPLQDASPAGGPSSPRDLPEPRVSTEHTNNKIEKIYIMKADTVIVGTVKAELPEGRGLAGPAEPELEEELEADHTPHYPEQETEPPLGSCSDVMLSVEEEGKEDPLPTAASGK

SEQ ID NO: 56 - protein, 107 aa, Unknown
  Description of Unknown: CD28TM+IC sequence
IEVMYPPPYLDNEKSNGTIIHVKGKHLCPSPLFPGPSKPFWVLVVVGGVLACYSLLVTVAFIIFWVRSKRSRLLHSDYMNMTPRRPGPTRKHYQPYAPPRDFAAYRS

SEQ ID NO: 57 - protein, 94 aa, Unknown
  Description of Unknown: 41BB TM+IC sequence
PADLSPGASSVTPPAPAREPGHSPQIISFFLALTSTALLFLLFFLTLRFSVVKRGRKKLLYIFKQPFMRPVQTTQEEDGCSCRFPEEEEGGCEL

SEQ ID NO: 58 - protein, 110 aa, Unknown
  Description of Unknown: OX40 TM+IC sequence
DRDPPATQPQETQGPPARPITVQPTEAWPRTSQGPSTRPVEVPGGRAVAAILGLGLVLGLLGPLAILLALYLLRRDQRLPPDAHKPPGGGSFRTPIQEEQADAHSTLAKI

SEQ ID NO: 59 - protein, 119 aa, Unknown
  Description of Unknown: CD27TM+IC sequence
PTHLPYVSEMLEARTAGHMQTLADFRQLPARTLSTHWPPQRSLCSSDFIRILVIFSGMFLVFTLAGALFLHQRRKYRSNKGESPVEPAEPCRYSCPREEEGSTIPIQEDYRKPEPACSP

SEQ ID NO: 60 - protein, 254 aa, Artificial Sequence
  Description of Artificial Sequence: Synthetic polypeptide
IEVMYPPPYLDNEKSNGTIIHVKGKHLCPSPLFPGPSKPFWVLVVVGGVLACYSLLVTVAFIIFWVHRRACRKRIRQKLHLCYPVQTSQPKLELVDSRPRRSSTQLRSGASVTEPVAEERGLMSQPLMETCHSVGAAYLESLPLQDASPAGGPSSPRDLPEPRVSTEHTNNKIEKIYIMKADTVIVGTVKAELPEGRGLAGPAEPELEEELEADHTPHYPEQETEPPLGSCSDVMLSVEEEGKEDPLPTAASGK

SEQ ID NO: 61 - protein, 240 aa, Artificial Sequence
  Description of Artificial Sequence: Synthetic polypeptide
PADLSPGASSVTPPAPAREPGHSPQIISFFLALTSTALLFLLFFLTLRFSVVHRRACRKRIRQKLHLCYPVQTSQPKLELVDSRPRRSSTQLRSGASVTEPVAEERGLMSQPLMETCHSVGAAYLESLPLQDASPAGGPSSPRDLPEPRVSTEHTNNKIEKIYIMKADTVIVGTVKAELPEGRGLAGPAEPELEEELEADHTPHYPEQETEPPLGSCSDVMLSVEEEGKEDPLPTAASGK

SEQ ID NO: 62 - protein, 256 aa, Artificial Sequence
  Description of Artificial Sequence: Synthetic polypeptide
DRDPPATQPQETQGPPARPITVQPTEAWPRTSQGPSTRPVEVPGGRAVAAILGLGLVLGLLGPLAILLHRRACRKRIRQKLHLCYPVQTSQPKLELVDSRPRRSSTQLRSGASVTEPVAEERGLMSQPLMETCHSVGAAYLESLPLQDASPAGGPSSPRDLPEPRVSTEHTNNKIEKIYIMKADTVIVGTVKAELPEGRGLAGPAEPELEEELEADHTPHYPEQETEPPLGSCSDVMLSVEEEGKEDPLPTAASGK

SEQ ID NO: 63 - protein, 259 aa, Artificial Sequence
  Description of Artificial Sequence: Synthetic polypeptide
PTHLPYVSEMLEARTAGHMQTLADFRQLPARTLSTHWPPQRSLCSSDFIRILVIFSGMFLVFTLAGALFLHHRRACRKRIRQKLHLCYPVQTSQPKLELVDSRPRRSSTQLRSGASVTEPVAEERGLMSQPLMETCHSVGAAYLESLPLQDASPAGGPSSPRDLPEPRVSTEHTNNKIEKIYIMKADTVIVGTVKAELPEGRGLAGPAEPELEEELEADHTPHYPEQETEPPLGSCSDVMLSVEEEGKEDPLPTAASGK

SEQ ID NO: 64 - protein, 257 aa, Artificial Sequence
  Description of Artificial Sequence: Synthetic polypeptide
TTTPAPRPPTPAPTIASQPLSLRPEACRPAAGGAVHTRGLDFACDIYIWAPLAGTCGVLLLSLVITLYCHRRACRKRIRQKLHLCYPVQTSQPKLELVDSRPRRSSTQLRSGASVTEPVAEERGLMSQPLMETCHSVGAAYLESLPLQDASPAGGPSSPRDLPEPRVSTEHTNNKIEKIYIMKADTVIVGTVKAELPEGRGLAGPAEPELEEELEADHTPHYPEQETEPPLGSCSDVMLSVEEEGKEDPLPTAASGK

SEQ ID NO: 65 - protein, 595 aa, Homo sapiens
MRVLLAALGLLFLGALRAFPQDRPFEDTCHGNPSHYYDKAVRRCCYRCPMGLFPTQQCPQRPTDCRKQCEPDYYLDEADRCTACVTCSRDDLVEKTPCAWNSSRVCECRPGMFCSTSAVNSCARCFFHSVCPAGMIVKFPGTAQKNTVCEPASPGVSPACASPENCKEPSSGTIPQAKPTPVSPATSSASTMPVRGGTRLAQEAASKLTRAPDSPSSVGRPSSDPGLSPTQPCPEGSGDCRKQCEPDYYLDEAGRCTACVSCSRDDLVEKTPCAWNSSRTCECRPGMICATSATNSCARCVPYPICAAETVTKPQDMAEKDTTFEAPPLGTQPDCNPTPENGEAPASTSPTQSLLVDSQASKTLPIPTSAPVALSSTGKPVLDAGPVLFWVILVLVVVVGSSAFLLCHRRACRKRIRQKLHLCYPVQTSQPKLELVDSRPRRSSTQLRSGASVTEPVAEERGLMSQPLMETCHSVGAAYLESLPLQDASPAGGPSSPRDLPEPRVSTEHTNNKIEKIYIMKADTVIVGTVKAELPEGRGLAGPAEPELEEELEADHTPHYPEQETEPPLGSCSDVMLSVEEEGKEDPLPTAASGK

SEQ ID NO: 66 - protein, 21 aa, Unknown
  Description of Unknown: CD8 transmembrane sequence
IYIWAPLAGTCGVLLLSLVIT

SEQ ID NO: 67 - protein, 27 aa, Unknown
  Description of Unknown: 4-1BB transmembrane sequence
IISFFLALTSTALLFLLFFLTLRFSVV

SEQ ID NO: 68 - protein, 21 aa, Unknown
  Description of Unknown: CD27 transmembrane sequence
ILVIFSGMFLVFTLAGALFLH

SEQ ID NO: 69 - protein, 27 aa, Unknown
  Description of Unknown: CD28 transmembrane sequence
FWVLVVVGGVLACYSLLVTVAFIIFWV

SEQ ID NO: 70 - protein, 28 aa, Unknown
  Description of Unknown: CD30 transmembrane sequence
PVLDAGPVLFWVILVLVVVVGSSAFLLC

SEQ ID NO: 71 - protein, 21 aa, Unknown
  Description of Unknown: OX40 transmembrane sequence
VAAILGLGLVLGLLGPLAILL

SEQ ID NO: 72 - protein, 42 aa, Unknown
  Description of Unknown: 4-1BB IC signaling sequence
KRGRKKLLYIFKQPFMRPVQTTQEEDGCSCRFPEEEEGGCEL

SEQ ID NO: 73 - protein, 48 aa, Unknown
  Description of Unknown: CD27 IC signaling sequence
QRRKYRSNKGESPVEPAEPCRYSCPREEEGSTIPIQEDYRKPEPACSP

SEQ ID NO: 74 - protein, 41 aa, Unknown
  Description of Unknown: CD28 IC signaling sequence
RSKRSRLLHSDYMNMTPRRPGPTRKHYQPYAPPRDFAAYRS

SEQ ID NO: 75 - protein, 188 aa, Unknown
  Description of Unknown: CD30 IC signaling sequence
HRRACRKRIRQKLHLCYPVQTSQPKLELVDSRPRRSSTQLRSGASVTEPVAEERGLMSQPLMETCHSVGAAYLESLPLQDASPAGGPSSPRDLPEPRVSTEHTNNKIEKIYIMKADTVIVGTVKAELPEGRGLAGPAEPELEEELEADHTPHYPEQETEPPLGSCSDVMLSVEEEGKEDPLPTAASGK

SEQ ID NO: 76 - protein, 42 aa, Unknown
  Description of Unknown: OX40 IC signaling sequence
ALYLLRRDQRLPPDAHKPPGGGSFRTPIQEEQADAHSTLAKI

SEQ ID NO: 77 - protein, 112 aa, Unknown
  Description of Unknown: CD3-zeta IC signaling sequence
RVKFSRSADAPAYQQGQNQLYNELNLGRREEYDVLDKRRGRDPEMGGKPRRKNPQEGLYNELQKDKMAEAYSEIGMKGERRRGKGHDGLYQGLSTATKDTYDALHMQALPPR

SEQ ID NO: 78 - protein, 21 aa, Artificial Sequence
  Description of Artificial Sequence: Synthetic peptide
SRGGGGSGGGGSGGGGSLEMA

SEQ ID NO: 79 - protein, 5 aa, Artificial Sequence
  Description of Artificial Sequence: Synthetic peptide
GGGGS

SEQ ID NO: 80 - protein, 4 aa, Artificial Sequence
  Description of Artificial Sequence: Synthetic peptide
GGSG

SEQ ID NO: 81 - protein, 4 aa, Artificial Sequence
  Description of Artificial Sequence: Synthetic peptide
SGGG

SEQ ID NO: 82 - protein, 4 aa, Artificial Sequence
  Description of Artificial Sequence: Synthetic peptide
GSGS

SEQ ID NO: 83 - protein, 6 aa, Artificial Sequence
  Description of Artificial Sequence: Synthetic peptide
GSGSGS

SEQ ID NO: 84 - protein, 8 aa, Artificial Sequence
  Description of Artificial Sequence: Synthetic peptide
GSGSGSGS

SEQ ID NO: 85 - protein, 10 aa, Artificial Sequence
  Description of Artificial Sequence: Synthetic peptide
GSGSGSGSGS

SEQ ID NO: 86 - protein, 6 aa, Artificial Sequence
  Description of Artificial Sequence: Synthetic peptide
GGSGGS

SEQ ID NO: 87 - protein, 9 aa, Artificial Sequence
  Description of Artificial Sequence: Synthetic peptide
GGSGGSGGS

SEQ ID NO: 88 - protein, 12 aa, Artificial Sequence
  Description of Artificial Sequence: Synthetic peptide
GGSGGSGGSGGS

SEQ ID NO: 89 - protein, 4 aa, Artificial Sequence
  Description of Artificial Sequence: Synthetic peptide
GGSG

SEQ ID NO: 90 - protein, 8 aa, Artificial Sequence
  Description of Artificial Sequence: Synthetic peptide
GGSGGGSG

SEQ ID NO: 91 - protein, 12 aa, Artificial Sequence
  Description of Artificial Sequence: Synthetic peptide
GGSGGGSGGGSG

SEQ ID NO: 92 - protein, 21 aa, Artificial Sequence
  Description of Artificial Sequence: Synthetic peptide
SRGGGGSGGGGSGGGGSLEMA

SEQ ID NO: 93 - protein, 6 aa, Artificial Sequence
  Description of Artificial Sequence: Synthetic 6xHis tag
HHHHHH

SEQ ID NO: 94 - protein, 9 aa, Artificial Sequence
  Description of Artificial Sequence: Synthetic peptide
YPYDVPDYA

SEQ ID NO: 95 - protein, 10 aa, Artificial Sequence
  Description of Artificial Sequence: Synthetic peptide
YPYDVPDYAS

SEQ ID NO: 96 - protein, 8 aa, Artificial Sequence
  Description of Artificial Sequence: Synthetic peptide
DYKDDDDK

SEQ ID NO: 97 - protein, 10 aa, Artificial Sequence
  Description of Artificial Sequence: Synthetic peptide
EQKLISEEDL

SEQ ID NO: 98 - protein, 114 aa, Artificial Sequence
  Description of Artificial Sequence: Synthetic polypeptide
EVQLVESGGGLVQPGGSLRLSCAASGFTFSNYAMSWVRQAPGKGLEWVSAISGSGGSTYYADSVKGRFTISRDNSKNTLYLQMNSLRAEDTAVYYCARPYYDDWGQGTLVTVSS

SEQ ID NO: 99 - protein, 112 aa, Artificial Sequence
  Description of Artificial Sequence: Synthetic polypeptide
QSVVTQPPSVSAAPGQKVTISCSGSSSNIGNNYVSWYQQLPGTAPKLLIYENNKRPSGIPDRFSGSKSGTSATLGITGLQTGDEADYYCGTWDSSLSAGAVFGGGTKLTVLG

SEQ ID NO: 100 - protein, 118 aa, Artificial Sequence
  Description of Artificial Sequence: Synthetic polypeptide
QVQLVESGGGLVQPGGSLRLSCAASGFTFSNYAMSWVRQAPGKGLEWVSSISGSGGSTYYADSVKGRFTISRDTSKNTLYLQMNSLRAEDTAVYYCARYGSAAWMDSWGQGTLVTVSS

SEQ ID NO: 101 - protein, 108 aa, Artificial Sequence
  Description of Artificial Sequence: Synthetic polypeptide
DIQLTQSPSSLSTSVGDRVTITCQASHDIRNYLNWYQQKPGKAPNLLIYAASNLQTGVPSRFSGRGSGTDFTLTISSLQPEDIATYYCQQYDGLPLTFGQGTRLEIKR

SEQ ID NO: 102 - protein, 130 aa, Artificial Sequence
  Description of Artificial Sequence: Synthetic polypeptide
EVQLVQSGAEVKKPGESLKISCKGSGYSFTSYWIGWVRQMPGKGLEWMGIIYPGDSDTRYSPSFQGQVTISADKSISTAYLQWSSLKASDTAMYYCARQVWGWQGGMYPRSNWWYNLDSWGQGTLVTVSS

SEQ ID NO: 103 - protein, 109 aa, Artificial Sequence
  Description of Artificial Sequence: Synthetic polypeptide
LPVLTQPPSVSVAPGKTARITCGGNNIGSKSVHWYQQKPGQAPVLVVYDDSDRPSGIPERFSGSNSGNTATLTISRVEAGDEADYYCQVWDSSSDYVVFGGGTKLTVLG

SEQ ID NO: 104 - protein, 121 aa, Artificial Sequence
  Description of Artificial Sequence: Synthetic polypeptide
QVQLQQPGAELVKPGASVKMSCKASGYTFTSYNMHWVKQTPGRGLEWIGAIYPGNGDTSYNQKFKGKATLTADKSSSTAYMQLSSLTSEDSAVYYCARSTYYGGDWYFNVWGAGTTVTVSS

SEQ ID NO: 105 - protein, 107 aa, Artificial Sequence
  Description of Artificial Sequence: Synthetic polypeptide
QIVLSQSPAILSASPGEKVTMTCRASSSVSYIHWFQQKPGSSPKPWIYATSNLASGVPVRFSGSGSGTSYSLTISRVEAEDAATYYCQQWTSNPPTFGGGTKLEIKR

SEQ ID NO: 106 - protein, 115 aa, Artificial Sequence
  Description of Artificial Sequence: Synthetic polypeptide
QVQLQESGPGLVKPSQTLSLTCTVSGYTFTNYYVFWVRQARGQRLEWIGDINPVNGDTNFNEKFKNRVTISADKSISTAYLQWSSLKASDTAMYYCARGGYTMDYWGQGTLVTVS

SEQ ID NO: 107 - protein, 113 aa, Artificial Sequence
  Description of Artificial Sequence: Synthetic polypeptide
DIVMTQTPLSLPVTPGEPASISCRSSQSLVHSNGNTYLHWYQQKPGKAPKLLIYKVSYRFSGVPDRFSGSGSGTDFTLKISRVEAEDVGVYYCSQNTHVPRTFGQGTKVEIKR

SEQ ID NO: 108 - protein, 117 aa, Artificial Sequence
  Description of Artificial Sequence: Synthetic polypeptide
QVQLVQSGAEVKKPGASVKVSCKASGYTFTSYYMHWVRQAPGQGLEWMGIINPSGGSTSYAQKFQGRVTMTRDTSTSTVYMELSSLRSEDTAVYYCARWHGGPYDYWGQGTLVTVSS

SEQ ID NO: 109 - protein, 109 aa, Artificial Sequence
  Description of Artificial Sequence: Synthetic polypeptide
QPVLTQPPSVSVAPGKTARITCGGNNIGSKSVHWYQQKPGQAPVLVIYYDSDRPSGIPERFSGSNSGNTATLTISRVEAGDEADYYCQVWDSSSDHYVFGTGTKVTVLG

SEQ ID NO: 110 - protein, 120 aa, Artificial Sequence
  Description of Artificial Sequence: Synthetic polypeptide
QVQLVQSGADVRKPGASVKVSCKASGYTFASHGISWVRQAPGQGLEWLGWISPYTGNTNYAQKFQGRVTMATDTSTSTAYMELRSLRSDDTAIYYCARGKRTLASCFDYWGQGTLVTVSS

SEQ ID NO: 111 - protein, 108 aa, Artificial Sequence
  Description of Artificial Sequence: Synthetic polypeptide
QSVLTQPPSVSVAPGKTARITCGGNNIGSKSVHWYQQKPGQAPVLVVYDDSDRPSGIPERFSGSNSGNTATLTISRVEAGDEADYYCQVWDSSSDHVFGTGTKVTVLG

SEQ ID NO: 112 - DNA, 180 bp, Artificial Sequence
  Description of Artificial Sequence: Synthetic polynucleotide
ggaggaaaaactgtttcatacagaaggcgtggaggaaaaactgtttcatacagaaggcgtggaggaaaaactgtttcatacagaaggcgtggaggaaaaactgtttcatacagaaggcgtggaggaaaaactgtttcatacagaaggcgtggaggaaaaactgtttcatacagaaggcgt

SEQ ID NO: 113 - DNA, 149 bp, Artificial Sequence
  Description of Artificial Sequence: Synthetic polynucleotide
gccgccccgactgcatctgcgtgttccaattcgccaatgacaagacgctgggcggggtttgtgtcatcatagaactaaagacatgcaaatatatttcttccggggacaccgccagcaaacgcgagcaacgggccacggggatgaagcag

SEQ ID NO: 114 - DNA, 335 bp, Artificial Sequence
  Description of Artificial Sequence: Synthetic polynucleotide
ggaggaaaaactgtttcatacagaaggcgtggaggaaaaactgtttcatacagaaggcgtggaggaaaaactgtttcatacagaaggcgtggaggaaaaactgtttcatacagaaggcgtggaggaaaaactgtttcatacagaaggcgtggaggaaaaactgtttcatacagaaggcgtctcgaggccgccccgactgcatctgcgtgttccaattcgccaatgacaagacgctgggcggggtttgtgtcatcatagaactaaagacatgcaaatatatttcttccggggacaccgccagcaaacgcgagcaacgggccacggggatgaagcag

SEQ ID NO: 115 - protein, 248 aa, Artificial Sequence
  Description of Artificial Sequence: Synthetic polypeptide
QPVLTQPPSASGTPGQRVTISCSGSSSNIGSNNVIWYQQLPGAAPKLLIYSNHRRPSGVPDRFSGSRSGTSASLAISGLQSEDEADYYCAAWDDSLDGYLFGTGTKVTVLGSRGGGGSGGGGSGGGGSLEMAQVQLQQWGAGLLKPSETLSLTCAVYGGSFSGYYWSWIRQPPGKGLEWIGEINHSGSTNYNPSLKSRVTISVDTSKNQFSLELSSVTAADTAVYYCARGYGGRFDYWGQGTLVTVSS

SEQ ID NO: 116 - protein, 250 aa, Artificial Sequence
  Description of Artificial Sequence: Synthetic polypeptide
QSVLTQPPSVSAAPGQRVTISCSGTRSNIGSDYVSWYQHLPGTAPKLLVYGDNLRPSGIPDRFSASKSGTSATLGITGLQTGDEADYYCGTWDYTLNGVVFGGGTKLTVLGSRGGGGSGGGGSGGGGSLEMAQVQLVESGGGLVQPGGSLRLSCAASGFTFSSYAMSWVRQAPGKGLEWVSVIYSGGSSTYYADSVKGRFTISRDNSKNTLYLQMNSLRAEDTAVYYCARTSYLNHGDYWGQGTLVTVSS

SEQ ID NO: 117 - protein, 248 aa, Artificial Sequence
  Description of Artificial Sequence: Synthetic polypeptide
QSVLTQPPSVSGTPGQRVIISCPGSTSNIGTNTVNWYQQFPGTAPKLLIYSNNQRPSGVPDRFSGSKSGTSASLAISGLQSEDEADYYCAAWDDSLNGVVFGGGTKLTVLGSRGGGGSGGGGSGGGGSLEMAQMQLVQSGGGLVKPGGSLRLSCAASGFTFSDYYMSWIRQAPGKGLEWVSYISSSGSTIYYADSVKGRFTISRDNAKNSLYLQMNSLRAEDTAVYYCARASDLYGDWGQGTLVTVSS

SEQ ID NO: 118 - protein, 252 aa, Artificial Sequence
  Description of Artificial Sequence: Synthetic polypeptide
QAVLTQPPSVSTPGQRVTISCSGSSSNFGSNTVHWYQQVPGTAPKLLIFSNTQRPSEIPDRFSGSKSGTSASLAISGLQSEDEADYYCAAWDDSLTGVVFGGGTKLTVLGSRGGGGSGGGGSGGGGSLEMAQVQLVQSGAEVKKPGASVTVSCKASGYRFSNYGVSWVRQAPGQGLEWMGWISGSNGNTNYAQKFLGRVTMTTDTSTTTAYMELSSLRSDDTAVYYCARGNRRYYSPIIDPWGQGTLVTVSS

SEQ ID NO: 119 - protein, 247 aa, Artificial Sequence
  Description of Artificial Sequence: Synthetic polypeptide
DVVMTQSPLSLPVTPGEPASVSCRSSQSLLHSNGYNYLDWYLQKPGQSPQLLIYLGSNRASGVPDRFSGSGSGTDFTLKISRVEAEDVGVYYCMQALQTPWTFGQGTKVEIKRSRGGGGSGGGGSGGGGSLEMAEVQLVQSGAEVRKPGSSVKVSCQASGGTFGSYAISWVRQAPGQGLEWMGRIIPVLGRTKYAQKFQGRVTVTADTSTSTVYMELTSLTSEDTAVYYCARTNDSWGQGTLVTVSS

SEQ ID NO: 120 - protein, 116 aa, Artificial Sequence
  Description of Artificial Sequence: Synthetic polypeptide
QVQLQQWGAGLLKPSETLSLTCAVYGGSFSGYYWSWIRQPPGKGLEWIGEINHSGSTNYNPSLKSRVTISVDTSKNQFSLELSSVTAADTAVYYCARGYGGRFDYWGQGTLVTVSS

SEQ ID NO: 121 - protein, 111 aa, Artificial Sequence
  Description of Artificial Sequence: Synthetic polypeptide
QPVLTQPPSASGTPGQRVTISCSGSSSNIGSNNVIWYQQLPGAAPKLLIYSNHRRPSGVPDRFSGSRSGTSASLAISGLQSEDEADYYCAAWDDSLDGYLFGTGTKVTVLG

SEQ ID NO: 122 - protein, 118 aa, Artificial Sequence
  Description of Artificial Sequence: Synthetic polypeptide
QVQLVESGGGLVQPGGSLRLSCAASGFTFSSYAMSWVRQAPGKGLEWVSVIYSGGSSTYYADSVKGRFTISRDNSKNTLYLQMNSLRAEDTAVYYCARTSYLNHGDYWGQGTLVTVSS

SEQ ID NO: 123 - protein, 111 aa, Artificial Sequence
  Description of Artificial Sequence: Synthetic polypeptide
QSVLTQPPSVSAAPGQRVTISCSGTRSNIGSDYVSWYQHLPGTAPKLLVYGDNLRPSGIPDRFSASKSGTSATLGITGLQTGDEADYYCGTWDYTLNGVVFGGGTKLTVLG

SEQ ID NO: 124 - protein, 116 aa, Artificial Sequence
  Description of Artificial Sequence: Synthetic polypeptide
QMQLVQSGGGLVKPGGSLRLSCAASGFTFSDYYMSWIRQAPGKGLEWVSYISSSGSTIYYADSVKGRFTISRDNAKNSLYLQMNSLRAEDTAVYYCARASDLYGDWGQGTLVTVSS

SEQ ID NO: 125 - protein, 111 aa, Artificial Sequence
  Description of Artificial Sequence: Synthetic polypeptide
QSVLTQPPSVSGTPGQRVIISCPGSTSNIGTNTVNWYQQFPGTAPKLLIYSNNQRPSGVPDRFSGSKSGTSASLAISGLQSEDEADYYCAAWDDSLNGVVFGGGTKLTVLG

SEQ ID NO: 126 - protein, 121 aa, Artificial Sequence
  Description of Artificial Sequence: Synthetic polypeptide
QVQLVQSGAEVKKPGASVTVSCKASGYRFSNYGVSWVRQAPGQGLEWMGWISGSNGNTNYAQKFLGRVTMTTDTSTTTAYMELSSLRSDDTAVYYCARGNRRYYSPIIDPWGQGTLVTVSS

SEQ ID NO: 127 - protein, 111 aa, Artificial Sequence
  Description of Artificial Sequence: Synthetic polypeptide
QAVLTQPPSVSGTPGQRVTISCSGSSSNFGSNTVHWYQQVPGTAPKLLIFSNTQRPSEIPDRFSGSKSGTSASLAISGLQSEDEADYYCAAWDDSLTGVVFGGGTKLTVLG

SEQ ID NO: 128 - protein, 117 aa, Artificial Sequence; identical to SEQ ID NO: 108
  Description of Artificial Sequence: Synthetic polypeptide

SEQ ID NO: 129 - protein, 109 aa, Artificial Sequence; identical to SEQ ID NO: 109
  Description of Artificial Sequence: Synthetic polypeptide

SEQ ID NO: 130 - protein, 120 aa, Artificial Sequence; identical to SEQ ID NO: 110
  Description of Artificial Sequence: Synthetic polypeptide

SEQ ID NO: 131 - protein, 108 aa, Artificial Sequence; identical to SEQ ID NO: 111
  Description of Artificial Sequence: Synthetic polypeptide

SEQ ID NO: 132 - protein, 113 aa, Artificial Sequence
  Description of Artificial Sequence: Synthetic polypeptide
EVQLVQSGAEVRKPGSSVKVSCQASGGTFGSYAISWVRQAPGQGLEWMGRIIPVLGRTKYAQKFQGRVTVTADTSTSTVYMELTSLTSEDTAVYYCARTNDSWGQGTLVTVSS

SEQ ID NO: 133 - protein, 113 aa, Artificial Sequence
  Description of Artificial Sequence: Synthetic polypeptide
DVVMTQSPLSLPVTPGEPASVSCRSSQSLLHSNGYNYLDWYLQKPGQSPQLLIYLGSNRASGVPDRFSGSGSGTDFTLKISRVEAEDVGVYYCMQALQTPWTFGQGTKVEIKR

SEQ ID NO: 134 - protein, 464 aa, Artificial Sequence
  Description of Artificial Sequence: Synthetic polypeptide
METDTLLLWVLLLWVPGSTGQPVLTQPPSASGTPGQRVTISCSGSSSNIGSNNVIWYQQLPGAAPKLLIYSNHRRPSGVPDRFSGSRSGTSASLAISGLQSEDEADYYCAAWDDSLDGYLFGTGTKVTVLGSRGGGGSGGGGSGGGGSLEMAQVQLQQWGAGLLKPSETLSLTCAVYGGSFSGYYWSWIRQPPGKGLEWIGEINHSGSTNYNPSLKSRVTISVDTSKNQFSLELSSVTAADTAVYYCARGYGGRFDYWGQGTLVTVSSEQKLISEEDLAAATGTTTPAPRPPTPAPTIASQPLSLRPEACRPAAGGAVHTRGLDFACDIYIWAPLAGTCGVLLLSLVITLYCRVKFSRSADAPAYQQGQNQLYNELNLGRREEYDVLDKRRGRDPEMGGKPRRKNPQEGLYNELQKDKMAEAYSEIGMKGERRRGKGHDGLYQGLSTATKDTYDALHMQALPPR

SEQ ID NO: 135 - protein, 466 aa, Artificial Sequence
  Description of Artificial Sequence: Synthetic polypeptide
METDTLLLWVLLLWVPGSTGQSVLTQPPSVSAAPGQRVTISCSGTRSNIGSDYVSWYQHLPGTAPKLLVYGDNLRPSGIPDRFSASKSGTSATLGITGLQTGDEADYYCGTWDYTLNGVVFGGGTKLTVLGSRGGGGSGGGGSGGGGSLEMAQVQLVESGGGLVQPGGSLRLSCAASGFTFSSYAMSWVRQAPGKGLEWVSVIYSGGSSTYYADSVKGRFTISRDNSKNTLYLQMNSLRAEDTAVYYCARTSYLNHGDYWGQGTLVTVSSEQKLISEEDLAAATGTTTPAPRPPTPAPTIASQPLSLRPEACRPAAGGAVHTRGLDFACDIYIWAPLAGTCGVLLLSLVITLYCRVKFSRSADAPAYQQGQNQLYNELNLGRREEYDVLDKRRGRDPEMGGKPRRKNPQEGLYNELQKDKMAEAYSEIGMKGERRRGKGHDGLYQGLSTATKDTYDALHMQALPPR

SEQ ID NO: 136 - protein, 464 aa, Artificial Sequence
  Description of Artificial Sequence: Synthetic polypeptide
METDTLLLWVLLLWVPGSTGQSVLTQPPSVSGTPGQRVIISCPGSTSNIGTNTVNWYQQFPGTAPKLLIYSNNQRPSGVPDRFSGSKSGTSASLAISGLQSEDEADYYCAAWDDSLNGVVFGGGTKLTVLGSRGGGGSGGGGSGGGGSLEMAQMQLVQSGGGLVKPGGSLRLSCAASGFTFSDYYMSWIRQAPGKGLEWVSYISSSGSTIYYADSVKGRFTISRDNAKNSLYLQMNSLRAEDTAVYYCARASDLYGDWGQGTLVTVSSEQKLISEEDLAAATGTTTPAPRPPTPAPTIASQPLSLRPEACRPAAGGAVHTRGLDFACDIYIWAPLAGTCGVLLLSLVITLYCRVKFSRSADAPAYQQGQNQLYNELNLGRREEYDVLDKRRGRDPEMGGKPRRKNPQEGLYNELQKDKMAEAYSEIGMKGERRRGKGHDGLYQGLSTATKDTYDALHMQALPPR

SEQ ID NO: 137 - protein, 468 aa, Artificial Sequence
  Description of Artificial Sequence: Synthetic polypeptide
METDTLLLWVLLLWVPGSTGQAVLTQPPSVSTPGQRVTISCSGSSSNFGSNTVHWYQQVPGTAPKLLIFSNTQRPSEIPDRFSGSKSGTSASLAISGLQSEDEADYYCAAWDDSLTGVVFGGGTKLTVLGSRGGGGSGGGGSGGGGSLEMAQVQLVQSGAEVKKPGASVTVSCKASGYRFSNYGVSWVRQAPGQGLEWMGWISGSNGNTNYAQKFLGRVTMTTDTSTTTAYMELSSLRSDDTAVYYCARGNRRYYSPIIDPWGQGTLVTVSSEQKLISEEDLAAATGTTTPAPRPPTPAPTIASQPLSLRPEACRPAAGGAVHTRGLDFACDIYIWAPLAGTCGVLLLSLVITLYCRVKFSRSADAPAYQQGQNQLYNELNLGRREEYDVLDKRRGRDPEMGGKPRRKNPQEGLYNELQKDKMAEAYSEIGMKGERRRGKGHDGLYQGLSTATKDTYDALHMQALPPR

SEQ ID NO: 138 - protein, 463 aa, Artificial Sequence
  Description of Artificial Sequence: Synthetic polypeptide
METDTLLLWVLLLWVPGSTGQPVLTQPPSVSVAPGKTARITCGGNNIGSKSVHWYQQKPGQAPVLVIYYDSDRPSGIPERFSGSNSGNTATLTISRVEAGDEADYYCQVWDSSSDHYVFGTGTKVTVLGSRGGGGSGGGGSGGGGSLEMAQVQLVQSGAEVKKPGASVKVSCKASGYTFTSYYMHWVRQAPGQGLEWMGIINPSGGSTSYAQKFQGRVTMTRDTSTSTVYMELSSLRSEDTAVYYCARWHGGPYDYWGQGTLVTVSSEQKLISEEDLAAATGTTTPAPRPPTPAPTIASQPLSLRPEACRPAAGGAVHTRGLDFACDIYIWAPLAGTCGVLLLSLVITLYCRVKFSRSADAPAYQQGQNQLYNELNLGRREEYDVLDKRRGRDPEMGGKPRRKNPQEGLYNELQKDKMAEAYSEIGMKGERRRGKGHDGLYQGLSTATKDTYDALHMQALPPR

SEQ ID NO: 139 - protein, 465 aa, Artificial Sequence
  Description of Artificial Sequence: Synthetic polypeptide
METDTLLLWVLLLWVPGSTGQSVLTQPPSVSVAPGKTARITCGGNNIGSKSVHWYQQKPGQAPVLVVYDDSDRPSGIPERFSGSNSGNTATLTISRVEAGDEADYYCQVWDSSSDHVFGTGTKVTVLGSRGGGGSGGGGSGGGGSLEMAQVQLVQSGADVRKPGASVKVSCKASGYTFASHGISWVRQAPGQGLEWLGWISPYTGNTNYAQKFQGRVTMATDTSTSTAYMELRSLRSDDTAIYYCARGKRTLASCFDYWGQGTLVTVSSEQKLISEEDLAAATGTTTPAPRPPTPAPTIASQPLSLRPEACRPAAGGAVHTRGLDFACDIYIWAPLAGTCGVLLLSLVITLYCRVKFSRSADAPAYQQGQNQLYNELNLGRREEYDVLDKRRGRDPEMGGKPRRKNPQEGLYNELQKDKMAEAYSEIGMKGERRRGKGHDGLYQGLSTATKDTYDALHMQALPPR

SEQ ID NO: 140 - protein, 463 aa, Artificial Sequence
  Description of Artificial Sequence: Synthetic polypeptide
METDTLLLWVLLLWVPGSTGDVVMTQSPLSLPVTPGEPASVSCRSSQSLLHSNGYNYLDWYLQKPGQSPQLLIYLGSNRASGVPDRFSGSGSGTDFTLKISRVEAEDVGVYYCMQALQTPWTFGQGTKVEIKRSRGGGGSGGGGSGGGGSLEMAEVQLVQSGAEVRKPGSSVKVSCQASGGTFGSYAISWVRQAPGQGLEWMGRIIPVLGRTKYAQKFQGRVTVTADTSTSTVYMELTSLTSEDTAVYYCARTNDSWGQGTLVTVSSEQKLISEEDLAAATGTTTPAPRPPTPAPTIASQPLSLRPEACRPAAGGAVHTRGLDFACDIYIWAPLAGTCGVLLLSLVITLYCRVKFSRSADAPAYQQGQNQLYNELNLGRREEYDVLDKRRGRDPEMGGKPRRKNPQEGLYNELQKDKMAEAYSEIGMKGERRRGKGHDGLYQGLSTATKDTYDALHMQALPPR

SEQ ID NO: 141 - protein, 500 aa, Artificial Sequence
  Description of Artificial Sequence: Synthetic polypeptide
METDTLLLWVLLLWVPGSTGQPVLTQPPSASGTPGQRVTISCSGSSSNIGSNNVIWYQQLPGAAPKLLIYSNHRRPSGVPDRFSGSRSGTSASLAISGLQSEDEADYYCAAWDDSLDGYLFGTGTKVTVLGSRGGGGSGGGGSGGGGSLEMAQVQLQQWGAGLLKPSETLSLTCAVYGGSFSGYYWSWIRQPPGKGLEWIGEINHSGSTNYNPSLKSRVTISVDTSKNQFSLELSSVTAADTAVYYCARGYGGRFDYWGQGTLVTVSSEQKLISEEDLAAAIEVMYPPPYLDNEKSNGTIIHVKGKHLCPSPLFPGPSKPFWVLVVVGGVLACYSLLVTVAFIIFWVRSKRSRLLHSDYMNMTPRRPGPTRKHYQPYAPPRDFAAYRSRVKFSRSADAPAYQQGQNQLYNELNLGRREEYDVLDKRRGRDPEMGGKPRRKNPQEGLYNELQKDKMAEAYSEIGMKGERRRGKGHDGLYQGLSTATKDTYDALHMQALPPR

SEQ ID NO: 142 - protein, 502 aa, Artificial Sequence
  Description of Artificial Sequence: Synthetic polypeptide
METDTLLLWVLLLWVPGSTGQSVLTQPPSVSAAPGQRVTISCSGTRSNIGSDYVSWYQHLPGTAPKLLVYGDNLRPSGIPDRFSASKSGTSATLGITGLQTGDEADYYCGTWDYTLNGVVFGGGTKLTVLGSRGGGGSGGGGSGGGGSLEMAQVQLVESGGGLVQPGGSLRLSCAASGFTFSSYAMSWVRQAPGKGLEWVSVIYSGGSSTYYADSVKGRFTISRDNSKNTLYLQMNSLRAEDTAVYYCARTSYLNHGDYWGQGTLVTVSSEQKLISEEDLAAAIEVMYPPPYLDNEKSNGTIIHVKGKHLCPSPLFPGPSKPFWVLVVVGGVLACYSLLVTVAFIIFWVRSKRSRLLHSDYMNMTPRRPGPTRKHYQPYAPPRDFAAYRSRVKFSRSADAPAYQQGQNQLYNELNLGRREEYDVLDKRRGRDPEMGGKPRRKNPQEGLYNELQKDKMAEAYSEIGMKGERRRGKGHDGLYQGLSTATKDTYDALHMQALPPR

SEQ ID NO: 143 - protein, 500 aa, Artificial Sequence
  Description of Artificial Sequence: Synthetic polypeptide
METDTLLLWVLLLWVPGSTGQSVLTQPPSVSGTPGQRVIISCPGSTSNIGTNTVNWYQQFPGTAPKLLIYSNNQRPSGVPDRFSGSKSGTSASLAISGLQSEDEADYYCAAWDDSLNGVVFGGGTKLTVLGSRGGGGSGGGGSGGGGSLEMAQMQLVQSGGGLVKPGGSLRLSCAASGFTFSDYYMSWIRQAPGKGLEWVSYISSSGSTIYYADSVKGRFTISRDNAKNSLYLQMNSLRAEDTAVYYCARASDLYGDWGQGTLVTVSSEQKLISEEDLAAAIEVMYPPPYLDNEKSNGTIIHVKGKHLCPSPLFPGPSKPFWVLVVVGGVLACYSLLVTVAFIIFWVRSKRSRLLHSDYMNMTPRRPGPTRKHYQPYAPPRDFAAYRSRVKFSRSADAPAYQQGQNQLYNELNLGRREEYDVLDKRRGRDPEMGGKPRRKNPQEGLYNELQKDKMAEAYSEIGMKGERRRGKGHDGLYQGLSTATKDTYDALHMQALPPR

SEQ ID NO: 144 - protein, 504 aa, Artificial Sequence
  Description of Artificial Sequence: Synthetic polypeptide
METDTLLLWVLLLWVPGSTGQAVLTQPPSVSTPGQRVTISCSGSSSNFGSNTVHWYQQVPGTAPKLLIFSNTQRPSEIPDRFSGSKSGTSASLAISGLQSEDEADYYCAAWDDSLTGVVFGGGTKLTVLGSRGGGGSGGGGSGGGGSLEMAQVQLVQSGAEVKKPGASVTVSCKASGYRFSNYGVSWVRQAPGQGLEWMGWISGSNGNTNYAQKFLGRVTMTTDTSTTTAYMELSSLRSDDTAVYYCARGNRRYYSPIIDPWGQGTLVTVSSEQKLISEEDLAAAIEVMYPPPYLDNEKSNGTIIHVKGKHLCPSPLFPGPSKPFWVLVVVGGVLACYSLLVTVAFIIFWVRSKRSRLLHSDYMNMTPRRPGPTRKHYQPYAPPRDFAAYRSRVKFSRSADAPAYQQGQNQLYNELNLGRREEYDVLDKRRGRDPEMGGKPRRKNPQEGLYNELQKDKMAEAYSEIGMKGERRRGKGHDGLYQGLSTATKDTYDALHMQALPPR

SEQ ID NO: 145 - protein, 499 aa, Artificial Sequence
  Description of Artificial Sequence: Synthetic polypeptide
METDTLLLWVLLLWVPGSTGQPVLTQPPSVSVAPGKTARITCGGNNIGSKSVHWYQQKPGQAPVLVIYYDSDRPSGIPERFSGSNSGNTATLTISRVEAGDEADYYCQVWDSSSDHYVFGTGTKVTVLGSRGGGGSGGGGSGGGGSLEMAQVQLVQSGAEVKKPGASVKVSCKASGYTFTSYYMHWVRQAPGQGLEWMGIINPSGGSTSYAQKFQGRVTMTRDTSTSTVYMELSSLRSEDTAVYYCARWHGGPYDYWGQGTLVTVSSEQKLISEEDLAAAIEVMYPPPYLDNEKSNGTIIHVKGKHLCPSPLFPGPSKPFWVLVVVGGVLACYSLLVTVAFIIFWVRSKRSRLLHSDYMNMTPRRPGPTRKHYQPYAPPRDFAAYRSRVKFSRSADAPAYQQGQNQLYNELNLGRREEYDVLDKRRGRDPEMGGKPRRKNPQEGLYNELQKDKMAEAYSEIGMKGERRRGKGHDGLYQGLSTATKDTYDALHMQALPPR

SEQ ID NO: 146 - protein, 501 aa, Artificial Sequence
  Description of Artificial Sequence: Synthetic polypeptide
METDTLLLWVLLLWVPGSTGQSVLTQPPSVSVAPGKTARITCGGNNIGSKSVHWYQQKPGQAPVLVVYDDSDRPSGIPERFSGSNSGNTATLTISRVEAGDEADYYCQVWDSSSDHVFGTGTKVTVLGSRGGGGSGGGGSGGGGSLEMAQVQLVQSGADVRKPGASVKVSCKASGYTFASHGISWVRQAPGQGLEWLGWISPYTGNTNYAQKFQGRVTMATDTSTSTAYMELRSLRSDDTAIYYCARGKRTLASCFDYWGQGTLVTVSSEQKLISEEDLAAAIEVMYPPPYLDNEKSNGTIIHVKGKHLCPSPLFPGPSKPFWVLVVVGGVLACYSLLVTVAFIIFWVRSKRSRLLHSDYMNMTPRRPGPTRKHYQPYAPPRDFAAYRSRVKFSRSADAPAYQQGQNQLYNELNLGRREEYDVLDKRRGRDPEMGGKPRRKNPQEGLYNELQKDKMAEAYSEIGMKGERRRGKGHDGLYQGLSTATKDTYDALHMQALPPR

SEQ ID NO: 147 - protein, 499 aa, Artificial Sequence
  Description of Artificial Sequence: Synthetic polypeptide
METDTLLLWVLLLWVPGSTGDVVMTQSPLSLPVTPGEPASVSCRSSQSLLHSNGYNYLDWYLQKPGQSPQLLIYLGSNRASGVPDRFSGSGSGTDFTLKISRVEAEDVGVYYCMQALQTPWTFGQGTKVEIKRSRGGGGSGGGGSGGGGSLEMAEVQLVQSGAEVRKPGSSVKVSCQASGGTFGSYAISWVRQAPGQGLEWMGRIIPVLGRTKYAQKFQGRVTVTADTSTSTVYMELTSLTSEDTAVYYCARTNDSWGQGTLVTVSSEQKLISEEDLAAAIEVMYPPPYLDNEKSNGTIIHVKGKHLCPSPLFPGPSKPFWVLVVVGGVLACYSLLVTVAFIIFWVRSKRSRLLHSDYMNMTPRRPGPTRKHYQPYAPPRDFAAYRSRVKFSRSADAPAYQQGQNQLYNELNLGRREEYDVLDKRRGRDPEMGGKPRRKNPQEGLYNELQKDKMAEAYSEIGMKGERRRGKGHDGLYQGLSTATKDTYDALHMQALPPR

SEQ ID NO: 148 - protein, 553 aa, Artificial Sequence
  Description of Artificial Sequence: Synthetic polypeptide
METDTLLLWVLLLWVPGSTGQPVLTQPPSASGTPGQRVTISCSGSSSNIGSNNVIWYQQLPGAAPKLLIYSNHRRPSGVPDRFSGSRSGTSASLAISGLQSEDEADYYCAAWDDSLDGYLFGTGTKVTVLGSRGGGGSGGGGSGGGGSLEMAQVQLQQWGAGLLKPSETLSLTCAVYGGSFSGYYWSWIRQPPGKGLEWIGEINHSGSTNYNPSLKSRVTISVDTSKNQFSLELSSVTAADTAVYYCARGYGGRFDYWGQGTLVTVSSEQKLISEEDLAAATGAPPLGTQPDCNPTPENGEAPASTSPTQSLLVDSQASKTLPIPTSAPVALSSTGKPVLDAGPVLFWVILVLVVVVGSSAFLLCHRRACRKRIRQKLHLCYPVQTSQPKLELVDSRPRRSSTQLRSGASVTEPVAEERGLMSQPLMETCHSVGAAYLESLPLQDASPAGGPSSPRDLPEPRVSTEHTNNKIEKIYIMKADTVIVGTVKAELPEGRGLAGPAEPELEEELEADHTPHYPEQETEPPLGSCSDVMLSVEEEGKEDPLPTAASGK

SEQ ID NO: 149 - protein, 553 aa, Artificial Sequence
  Description of Artificial Sequence: Synthetic polypeptide
METDTLLLWVLLLWVPGSTGQSVLTQPPSVSGTPGQRVIISCPGSTSNIGTNTVNWYQQFPGTAPKLLIYSNNQRPSGVPDRFSGSKSGTSASLAISGLQSEDEADYYCAAWDDSLNGVVFGGGTKLTVLGSRGGGGSGGGGSGGGGSLEMAQMQLVQSGGGLVKPGGSLRLSCAASGFTFSDYYMSWIRQAPGKGLEWVSYISSSGSTIYYADSVKGRFTISRDNAKNSLYLQMNSLRAEDTAVYYCARASDLYGDWGQGTLVTVSSEQKLISEEDLAAATGAPPLGTQPDCNPTPENGEAPASTSPTQSLLVDSQASKTLPIPTSAPVALSSTGKPVLDAGPVLFWVILVLVVVVGSSAFLLCHRRACRKRIRQKLHLCYPVQTSQPKLELVDSRPRRSSTQLRSGASVTEPVAEERGLMSQPLMETCHSVGAAYLESLPLQDASPAGGPSSPRDLPEPRVSTEHTNNKIEKIYIMKADTVIVGTVKAELPEGRGLAGPAEPELEEELEADHTPHYPEQETEPPLGSCSDVMLSVEEEGKEDPLPTAASGK

SEQ ID NO: 150 - protein, 557 aa, Artificial Sequence
  Description of Artificial Sequence: Synthetic polypeptide
METDTLLLWVLLLWVPGSTGQAVLTQPPSVSTPGQRVTISCSGSSSNFGSNTVHWYQQVPGTAPKLLIFSNTQRPSEIPDRFSGSKSGTSASLAISGLQSEDEADYYCAAWDDSLTGVVFGGGTKLTVLGSRGGGGSGGGGSGGGGSLEMAQVQLVQSGAEVKKPGASVTVSCKASGYRFSNYGVSWVRQAPGQGLEWMGWISGSNGNTNYAQKFLGRVTMTTDTSTTTAYMELSSLRSDDTAVYYCARGNRRYYSPIIDPWGQGTLVTVSSEQKLISEEDLAAATGAPPLGTQPDCNPTPENGEAPASTSPTQSLLVDSQASKTLPIPTSAPVALSSTGKPVLDAGPVLFWVILVLVVVVGSSAFLLCHRRACRKRIRQKLHLCYPVQTSQPKLELVDSRPRRSSTQLRSGASVTEPVAEERGLMSQPLMETCHSVGAAYLESLPLQDASPAGGPSSPRDLPEPRVSTEHTNNKIEKIYIMKADTVIVGTVKAELPEGRGLAGPAEPELEEELEADHTPHYPEQETEPPLGSCSDVMLSVEEEGKEDPLPTAASGK

SEQ ID NO: 151 - protein, 552 aa, Artificial Sequence
  Description of Artificial Sequence: Synthetic polypeptide
METDTLLLWVLLLWVPGSTGQPVLTQPPSVSVAPGKTARITCGGNNIGSKSVHWYQQKPGQAPVLVIYYDSDRPSGIPERFSGSNSGNTATLTISRVEAGDEADYYCQVWDSSSDHYVFGTGTKVTVLGSRGGGGSGGGGSGGGGSLEMAQVQLVQSGAEVKKPGASVKVSCKASGYTFTSYYMHWVRQAPGQGLEWMGIINPSGGSTSYAQKFQGRVTMTRDTSTSTVYMELSSLRSEDTAVYYCARWHGGPYDYWGQGTLVTVSSEQKLISEEDLAAATGAPPLGTQPDCNPTPENGEAPASTSPTQSLLVDSQASKTLPIPTSAPVALSSTGKPVLDAGPVLFWVILVLVVVVGSSAFLLCHRRACRKRIRQKLHLCYPVQTSQPKLELVDSRPRRSSTQLRSGASVTEPVAEERGLMSQPLMETCHSVGAAYLESLPLQDASPAGGPSSPRDLPEPRVSTEHTNNKIEKIYIMKADTVIVGTVKAELPEGRGLAGPAEPELEEELEADHTPHYPEQETEPPLGSCSDVMLSVEEEGKEDPLPTAASGK

SEQ ID NO: 152 - protein, 554 aa, Artificial Sequence
  Description of Artificial Sequence: Synthetic polypeptide
METDTLLLWVLLLWVPGSTGQSVLTQPPSVSVAPGKTARITCGGNNIGSKSVHWYQQKPGQAPVLVVYDDSDRPSGIPERFSGSNSGNTATLTISRVEAGDEADYYCQVWDSSSDHVFGTGTKVTVLGSRGGGGSGGGGSGGGGSLEMAQVQLVQSGADVRKPGASVKVSCKASGYTFASHGISWVRQAPGQGLEWLGWISPYTGNTNYAQKFQGRVTMATDTSTSTAYMELRSLRSDDTAIYYCARGKRTLASCFDYWGQGTLVTVSSEQKLISEEDLAAATGAPPLGTQPDCNPTPENGEAPASTSPTQSLLVDSQASKTLPIPTSAPVALSSTGKPVLDAGPVLFWVILVLVVVVGSSAFLLCHRRACRKRIRQKLHLCYPVQTSQPKLELVDSRPRRSSTQLRSGASVTEPVAEERGLMSQPLMETCHSVGAAYLESLPLQDASPAGGPSSPRDLPEPRVSTEHTNNKIEKIYIMKADTVIVGTVKAELPEGRGLAGPAEPELEEELEADHTPHYPEQETEPPLGSCSDVMLSVEEEGKEDPLPTAASGK

SEQ ID NO: 153 - protein, 552 aa, Artificial Sequence
  Description of Artificial Sequence: Synthetic polypeptide
METDTLLLWVLLLWVPGSTGDVVMTQSPLSLPVTPGEPASVSCRSSQSLLHSNGYNYLDWYLQKPGQSPQLLIYLGSNRASGVPDRFSGSGSGTDFTLKISRVEAEDVGVYYCMQALQTPWTFGQGTKVEIKRSRGGGGSGGGGSGGGGSLEMAEVQLVQSGAEVRKPGSSVKVSCQASGGTFGSYAISWVRQAPGQGLEWMGRIIPVLGRTKYAQKFQGRVTVTADTSTSTVYMELTSLTSEDTAVYYCARTNDSWGQGTLVTVSSEQKLISEEDLAAATGAPPLGTQPDCNPTPENGEAPASTSPTQSLLVDSQASKTLPIPTSAPVALSSTGKPVLDAGPVLFWVILVLVVVVGSSAFLLCHRRACRKRIRQKLHLCYPVQTSQPKLELVDSRPRRSSTQLRSGASVTEPVAEERGLMSQPLMETCHSVGAAYLESLPLQDASPAGGPSSPRDLPEPRVSTEHTNNKIEKIYIMKADTVIVGTVKAELPEGRGLAGPAEPELEEELEADHTPHYPEQETEPPLGSCSDVMLSVEEEGKEDPLPTAASGK

SEQ ID NO: 154 - protein, 20 aa, Unknown
  Description of Unknown: Signal peptide sequence
METDTLLLWVLLLWVPGSTG

SEQ ID NO: 155 - protein, 45 aa, Unknown
  Description of Unknown: Dap10 TM+IC sequence
LLAGLVAADAVASLLIVGAVFLCARPRRSPAQEDGKVYINMPGRG

SEQ ID NO: 156 - protein, 23 aa, Unknown
  Description of Unknown: Dap10 IC signaling sequence
CARPRRSPAQEDGKVYINMPGRG

SEQ ID NO: 157 - protein, 9 aa, Homo sapiens
PLFQVPEPV

SEQ ID NO: 158 - protein, 9 aa, Homo sapiens
FMNKFIYEI

SEQ ID NO: 159 - protein, 10 aa, Homo sapiens
GLSPNLNRFL

SEQ ID NO: 160 - protein, 9 aa, Homo sapiens
GVALQTMKQ

SEQ ID NO: 161 - protein, 9 aa, Homo sapiens
AMNKFIYEI

SEQ ID NO: 162 - protein, 9 aa, Homo sapiens
FMAKFIYEI

SEQ ID NO: 163 - protein, 9 aa, Homo sapiens
FMNAFIYEI

SEQ ID NO: 164 - protein, 9 aa, Homo sapiens
FMNKAIYEI

SEQ ID NO: 165 - protein, 9 aa, Homo sapiens
FMNKFAYEI

SEQ ID NO: 166 - protein, 9 aa, Homo sapiens
FMNKFIAEI

SEQ ID NO: 167 - protein, 9 aa, Homo sapiens
FMNKFIYAI

SEQ ID NO: 168 - protein, 8 aa, Artificial Sequence
  Description of Artificial Sequence: Synthetic peptide
GYTFTSYG

SEQ ID NO: 169 - protein, 8 aa, Artificial Sequence
  Description of Artificial Sequence: Synthetic peptide
ISAYNGNT

SEQ ID NO: 170 - protein, 13 aa, Artificial Sequence
  Description of Artificial Sequence: Synthetic peptide
ARDSYYYYYGMDV

SEQ ID NO: 171 - protein, 120 aa, Artificial Sequence
  Description of Artificial Sequence: Synthetic polypeptide
EVQLVQSGAEVKKPGASVKVSCKASGYTFTSYGISWVRQAPGQGLEWMGWISAYNGNTNYAQKLQGRVTMTTDTSTSTAYMELRSLRSDDTAVYYCARDSYYYYYGMDVWGQGTTVTVSS

SEQ ID NO: 172 - protein, 9 aa, Artificial Sequence
  Description of Artificial Sequence: Synthetic peptide
TGAVTSGHY

SEQ ID NO: 173 - protein, 3 aa, Artificial Sequence
  Description of Artificial Sequence: Synthetic peptide
DAS

SEQ ID NO: 174 - protein, 9 aa, Artificial Sequence
  Description of Artificial Sequence: Synthetic peptide
LLSYSDALV

SEQ ID NO: 175 - protein, 110 aa, Artificial Sequence
  Description of Artificial Sequence: Synthetic polypeptide
QAVVTQEPSLTVSPGGTVTLTCGSSTGAVTSGHYPYWFQQKPGQAPRTLIYDASDKHSWTPARFSGSLLGGKAALTLSGAQPEDEAEYYCLLSYSDALVFGGGTKLTVLG

SEQ ID NO: 176 - protein, 8 aa, Artificial Sequence
  Description of Artificial Sequence: Synthetic peptide
GYSFPNYW

SEQ ID NO: 177 - protein, 8 aa, Artificial Sequence
  Description of Artificial Sequence: Synthetic peptide
IDPGDSYT

SEQ ID NO: 178 - protein, 10 aa, Artificial Sequence
  Description of Artificial Sequence: Synthetic peptide
ARYYVSLVDI

SEQ ID NO: 179 - protein, 117 aa, Artificial Sequence
  Description of Artificial Sequence: Synthetic polypeptide
EVQLVQSGAEVKKPGESLTISCKASGYSFPNYWITWVRQMSGGGLEWMGRIDPGDSYTTYNPSFQGHVTISIDKSTNTAYLHWNSLKASDTAMYYCARYYVSLVDIWGQGTLVTVSS

SEQ ID NO: 180 - protein, 9 aa, Artificial Sequence
  Description of Artificial Sequence: Synthetic peptide
SSDVGGYNY

SEQ ID NO: 181 - protein, 3 aa, Artificial Sequence
  Description of Artificial Sequence: Synthetic peptide
DVN

SEQ ID NO: 182 - protein, 10 aa, Artificial Sequence
  Description of Artificial Sequence: Synthetic peptide
SSYTTGSRAV

SEQ ID NO: 183 - protein, 111 aa, Artificial Sequence
  Description of Artificial Sequence: Synthetic polypeptide
QSVLTQPASVSGSPGQSITISCTGTSSDVGGYNYVSWYQQHPGKAPKLMIYDVNNRPSEVSNRFSGSKSGNTASLTISGLQAEDEADYYCSSYTTGSRAVFGGGTKLTVLG

SEQ ID NO: 184 - protein, 8 aa, Artificial Sequence
  Description of Artificial Sequence: Synthetic peptide
GFTFSNAW

SEQ ID NO: 185 - protein, 10 aa, Artificial Sequence
  Description of Artificial Sequence: Synthetic peptide
IRSKAYGGTT

SEQ ID NO: 186 - protein, 15 aa, Artificial Sequence
  Description of Artificial Sequence: Synthetic peptide
ARDGLYSSSWYDSDY

SEQ ID NO: 187 - protein, 124 aa, Artificial Sequence
  Description of Artificial Sequence: Synthetic polypeptide
EVQLVESGGGLVKPGGSLRLSCAASGFTFSNAWMSWVRQAPGKGLEWVGFIRSKAYGGTTEYAASVKGRFTISRDDSKSIAYLQMNNLKTEDTAVYYCARDGLYSSSWYDSDYWGQGTLVTVSS

SEQ ID NO: 188 - protein, 8 aa, Artificial Sequence
  Description of Artificial Sequence: Synthetic peptide
SSNIGNNY

SEQ ID NO: 189 - protein, 3 aa, Artificial Sequence
  Description of Artificial Sequence: Synthetic peptide
DNN

SEQ ID NO: 190 - protein, 11 aa, Artificial Sequence
  Description of Artificial Sequence: Synthetic peptide
GTWDGSLYTML

SEQ ID NO: 191 - protein, 111 aa, Artificial Sequence
  Description of Artificial Sequence: Synthetic polypeptide
QSVVTQPPSVSAAPGQKVTISCSGSSSNIGNNYVSWYQQLPGTAPKLLIYDNNKRPSGIPDRFSGSKSGTSATLGITGLQTGDEADYYCGTWDGSLYTMLFGGGTKLTVLG

SEQ ID NO: 192 - protein, 8 aa, Artificial Sequence
  Description of Artificial Sequence: Synthetic peptide
GFTFDDYA

SEQ ID NO: 193 - protein, 8 aa, Artificial Sequence
  Description of Artificial Sequence: Synthetic peptide
ISWNSGSI

SEQ ID NO: 194 - protein, 19 aa, Artificial Sequence
  Description of Artificial Sequence: Synthetic peptide
AKDIHSGSYYGLLYYAMDV

SEQ ID NO: 195 - protein, 126 aa, Artificial Sequence
  Description of Artificial Sequence: Synthetic polypeptide
QMQLVQSGGGLVQPGRSLRLSCAASGFTFDDYAMHWVRQAPGKGLEWVSGISWNSGSIGYADSVKGRFTISRDNAKNSLYLQMNSLRAEDTALYYCAKDIHSGSYYGLLYYAMDVWGQGTTVTVSS

SEQ ID NO: 196 - protein, 9 aa, Artificial Sequence
  Description of Artificial Sequence: Synthetic peptide
SSNIGAGYD

SEQ ID NO: 197 - protein, 3 aa, Artificial Sequence
  Description of Artificial Sequence: Synthetic peptide
GNS

SEQ ID NO: 198 - protein, 12 aa, Artificial Sequence
  Description of Artificial Sequence: Synthetic peptide
QSYDSSLSGSGV

SEQ ID NO: 199 - protein, 113 aa, Artificial Sequence
  Description of Artificial Sequence: Synthetic polypeptide
QSVLTQPPSVSGAPGQRVTISCTGSSSNIGAGYDVHWYQQLPGTAPKLLIFGNSNRPSGVPDRFSGFKSGTSASLAITGLQAEDEADYFCQSYDSSLSGSGVFGTGTKVTVLG

SEQ ID NO: 200 - protein, 8 aa, Artificial Sequence
  Description of Artificial Sequence: Synthetic peptide
GYTFTSYG

SEQ ID NO: 201 - protein, 8 aa, Artificial Sequence
  Description of Artificial Sequence: Synthetic peptide
ISAYNGNT

SEQ ID NO: 202 - protein, 14 aa, Artificial Sequence
  Description of Artificial Sequence: Synthetic peptide
ARFQDWWYLGQFDQ

SEQ ID NO: 203 - protein, 121 aa, Artificial Sequence
  Description of Artificial Sequence: Synthetic polypeptide
EVQLVQSGAEVKKPGASVKVSCKASGYTFTSYGISWVRQAPGQGLEWMGWISAYNGNTNYAQKLQGRVTMTTDTSTSTAYMELRSLRSDDTAVYYCARFQDWWYLGQFDQWGQGTLVTVSS

SEQ ID NO: 204 - protein, 9 aa, Artificial Sequence
  Description of Artificial Sequence: Synthetic peptide
GSDVGVYYY

SEQ ID NO: 205 - protein, 3 aa, Artificial Sequence
  Description of Artificial Sequence: Synthetic peptide
DVD

SEQ ID NO: 206 - protein, 12 aa, Artificial Sequence
  Description of Artificial Sequence: Synthetic peptide
ASYTNRNSLGYV

SEQ ID NO: 207 - protein, 113 aa, Artificial Sequence
  Description of Artificial Sequence: Synthetic polypeptide
QSALTQPASVSGSPGQSITISCTATGSDVGVYYYVSWYQQHPGKAPKVMIYDVDNRPPGVSNRFSGSKSGNTASLTISGLQAEDEADYYCASYTNRNSLGYVFGTGTKVTVLG

SEQ ID NO: 208 - protein, 8 aa, Artificial Sequence
  Description of Artificial Sequence: Synthetic peptide
GGSFSGYY

SEQ ID NO: 209 - protein, 7 aa, Artificial Sequence
  Description of Artificial Sequence: Synthetic peptide
INHSGST

SEQ ID NO: 210 - protein, 10 aa, Artificial Sequence
  Description of Artificial Sequence: Synthetic peptide
ARGYGGRFDY

SEQ ID NO: 211 - protein, 116 aa, Artificial Sequence; identical to SEQ ID NO: 120
  Description of Artificial Sequence: Synthetic polypeptide

SEQ ID NO: 212 - protein, 8 aa, Artificial Sequence
  Description of Artificial Sequence: Synthetic peptide
SSNIGSNN

SEQ ID NO: 213 - protein, 3 aa, Artificial Sequence
  Description of Artificial Sequence: Synthetic peptide
SNH

SEQ ID NO: 214 - protein, 11 aa, Artificial Sequence
  Description of Artificial Sequence: Synthetic peptide
AAWDDSLDGYL

SEQ ID NO: 215 - protein, 111 aa, Artificial Sequence; identical to SEQ ID NO: 121
  Description of Artificial Sequence: Synthetic polypeptide

SEQ ID NO: 216 - protein, 8 aa, Artificial Sequence
  Description of Artificial Sequence: Synthetic peptide
GFTFSSYA

SEQ ID NO: 217 - protein, 8 aa, Artificial Sequence
  Description of Artificial Sequence: Synthetic peptide
IYSGGSST

SEQ ID NO: 218 - protein, 11 aa, Artificial Sequence
  Description of Artificial Sequence: Synthetic peptide
ARTSYLNHGDY

SEQ ID NO: 219 - protein, 118 aa, Artificial Sequence; identical to SEQ ID NO: 122
  Description of Artificial Sequence: Synthetic polypeptide

SEQ ID NO: 220 - protein, 8 aa, Artificial Sequence
  Description of Artificial Sequence: Synthetic peptide
RSNIGSDY

SEQ ID NO: 221 - protein, 3 aa, Artificial Sequence
  Description of Artificial Sequence: Synthetic peptide
GDN

SEQ ID NO: 222 - protein, 11 aa, Artificial Sequence
  Description of Artificial Sequence: Synthetic peptide
GTWDYTLNGVV

SEQ ID NO: 223 - protein, 111 aa, Artificial Sequence; identical to SEQ ID NO: 123
  Description of Artificial Sequence: Synthetic polypeptide

SEQ ID NO: 224 - protein, 8 aa, Artificial Sequence
  Description of Artificial Sequence: Synthetic peptide
GFTFSDYY

SEQ ID NO: 225 - protein, 8 aa, Artificial Sequence
  Description of Artificial Sequence: Synthetic peptide
ISSSGSTI

SEQ ID NO: 226 - protein, 9 aa, Artificial Sequence
  Description of Artificial Sequence: Synthetic peptide
ARASDLYGD

SEQ ID NO: 227 - protein, 116 aa, Artificial Sequence; identical to SEQ ID NO: 124
  Description of Artificial Sequence: Synthetic polypeptide

SEQ ID NO: 228 - protein, 8 aa, Artificial Sequence
  Description of Artificial Sequence: Synthetic peptide
TSNIGTNT

SEQ ID NO: 229 - protein, 3 aa, Artificial Sequence
  Description of Artificial Sequence: Synthetic peptide
SNN

SEQ ID NO: 230 - protein, 11 aa, Artificial Sequence
  Description of Artificial Sequence: Synthetic peptide
AAWDDSLNGVV

SEQ ID NO: 231 - protein, 111 aa, Artificial Sequence; identical to SEQ ID NO: 125
  Description of Artificial Sequence: Synthetic polypeptide

SEQ ID NO: 232 - protein, 8 aa, Artificial Sequence
  Description of Artificial Sequence: Synthetic peptide
GYRFSNYG

SEQ ID NO: 233 - protein, 8 aa, Artificial Sequence
  Description of Artificial Sequence: Synthetic peptide
ISGSNGNT

SEQ ID NO: 234 - protein, 14 aa, Artificial Sequence
  Description of Artificial Sequence: Synthetic peptide
ARGNRRYYSPIIDP

SEQ ID NO: 235 - protein, 121 aa, Artificial Sequence; identical to SEQ ID NO: 126
  Description of Artificial Sequence: Synthetic polypeptide

SEQ ID NO: 236 - protein, 8 aa, Artificial Sequence
  Description of Artificial Sequence: Synthetic peptide
SSNFGSNT

SEQ ID NO: 237 - protein, 3 aa, Artificial Sequence
  Description of Artificial Sequence: Synthetic peptide
SNT

SEQ ID NO: 238 - protein, 11 aa, Artificial Sequence
  Description of Artificial Sequence: Synthetic peptide
AAWDDSLTGVV

SEQ ID NO: 239 - protein, 111 aa, Artificial Sequence; identical to SEQ ID NO: 127
  Description of Artificial Sequence: Synthetic polypeptide

SEQ ID NO: 240 - protein, 8 aa, Artificial Sequence
  Description of Artificial Sequence: Synthetic peptide
GGTFGSYA

SEQ ID NO: 241 - protein, 8 aa, Artificial Sequence
  Description of Artificial Sequence: Synthetic peptide
IIPVLGRT

SEQ ID NO: 242 - protein, 6 aa, Artificial Sequence
  Description of Artificial Sequence: Synthetic peptide
ARTNDS

SEQ ID NO: 243 - protein, 113 aa, Artificial Sequence; identical to SEQ ID NO: 132
  Description of Artificial Sequence: Synthetic polypeptide

SEQ ID NO: 244 - protein, 11 aa, Artificial Sequence
  Description of Artificial Sequence: Synthetic peptide
QSLLHSNGYNY

SEQ ID NO: 245 - protein, 3 aa, Artificial Sequence
  Description of Artificial Sequence: Synthetic peptide
LGS

SEQ ID NO: 246 - protein, 9 aa, Artificial Sequence
  Description of Artificial Sequence: Synthetic peptide
MQALQTPWT

SEQ ID NO: 247 - protein, 113 aa, Artificial Sequence; identical to SEQ ID NO: 133
  Description of Artificial Sequence: Synthetic polypeptide

SEQ ID NO: 248 - protein, 8 aa, Artificial Sequence
  Description of Artificial Sequence: Synthetic peptide
GYTFTSYY

SEQ ID NO: 249 - protein, 8 aa, Artificial Sequence
  Description of Artificial Sequence: Synthetic peptide
INPSGGST

SEQ ID NO: 250 - protein, 10 aa, Artificial Sequence
  Description of Artificial Sequence: Synthetic peptide
ARWHGGPYDY

SEQ ID NO: 251 - protein, 117 aa, Artificial Sequence; identical to SEQ ID NO: 108
  Description of Artificial Sequence: Synthetic polypeptide

SEQ ID NO: 252 - protein, 6 aa, Artificial Sequence
  Description of Artificial Sequence: Synthetic peptide
NIGSKS

SEQ ID NO: 253 - protein, 3 aa, Artificial Sequence
  Description of Artificial Sequence: Synthetic peptide
YDS

SEQ ID NO: 254 - protein, 11 aa, Artificial Sequence
  Description of Artificial Sequence: Synthetic peptide
QVWDSSSDHYV

SEQ ID NO: 255 - protein, 109 aa, Artificial Sequence; identical to SEQ ID NO: 109
  Description of Artificial Sequence: Synthetic polypeptide

SEQ ID NO: 256 - protein, 8 aa, Artificial Sequence
  Description of Artificial Sequence: Synthetic peptide
GYTFASHG

SEQ ID NO: 257 - protein, 8 aa, Artificial Sequence
  Description of Artificial Sequence: Synthetic peptide
ISPYTGNT

SEQ ID NO: 258 - protein, 13 aa, Artificial Sequence
  Description of Artificial Sequence: Synthetic peptide
ARGKRTLASCFDY

SEQ ID NO: 259 - protein, 120 aa, Artificial Sequence; identical to SEQ ID NO: 110
  Description of Artificial Sequence: Synthetic polypeptide

SEQ ID NO: 260 - protein, 6 aa, Artificial Sequence
  Description of Artificial Sequence: Synthetic peptide
NIGSKS

SEQ ID NO: 261 - protein, 3 aa, Artificial Sequence
  Description of Artificial Sequence: Synthetic peptide
DDS

SEQ ID NO: 262 - protein, 10 aa, Artificial Sequence
  Description of Artificial Sequence: Synthetic peptide
QVWDSSSDHV

SEQ ID NO: 263 - protein, 108 aa, Artificial Sequence; identical to SEQ ID NO: 111
  Description of Artificial Sequence: Synthetic polypeptide

SEQ ID NO: 264 - protein, 10 aa, Homo sapiens
KLVVVGAGGV

SEQ ID NO: 265 - protein, 10 aa, Homo sapiens
KLVVVGAVGV

SEQ ID NO: 266 - protein, 10 aa, Homo sapiens
KLVVVGACGV

SEQ ID NO: 267 - protein, 10 aa, Homo sapiens
KLVVVGADGV

SEQ ID NO: 268 - protein, 10 aa, Homo sapiens
KLVVVGASGV

SEQ ID NO: 269 - protein, 9 aa, Homo sapiens
LVVVGAGGV

SEQ ID NO: 270 - protein, 9 aa, Homo sapiens
LVVVGAVGV

SEQ ID NO: 271 - protein, 9 aa, Homo sapiens
LVVVGACGV

SEQ ID NO: 272 - protein, 9 aa, Homo sapiens
LVVVGADGV

SEQ ID NO: 273 - protein, 8 aa, Artificial Sequence
  Description of Artificial Sequence: Synthetic peptide
GGTFSSYA

SEQ ID NO: 274 - protein, 8 aa, Artificial Sequence
  Description of Artificial Sequence: Synthetic peptide
IIPIFGKG

SEQ ID NO: 275 - protein, 11 aa, Artificial Sequence
  Description of Artificial Sequence: Synthetic peptide
ARHIPTFSFDY

SEQ ID NO: 276 - protein, 118 aa, Artificial Sequence
  Description of Artificial Sequence: Synthetic polypeptide
QVQLVQSGAEVKKPGSSVKVSCKASGGTFSSYAISWVRQAPGQGLEWMGGIIPIFGKGNYPQKFQGRVTITADESTGTAYMELSSLRSEDTAVYYCARHIPTFSFDYWGQGTLVTVSS

SEQ ID NO: 277 - protein, 9 aa, Artificial Sequence
  Description of Artificial Sequence: Synthetic peptide
SSNIGAGYD

SEQ ID NO: 278 - protein, 3 aa, Artificial Sequence
  Description of Artificial Sequence: Synthetic peptide
GNS

SEQ ID NO: 279 - protein, 11 aa, Artificial Sequence
  Description of Artificial Sequence: Synthetic peptide
QSYDSSLSGYV

SEQ ID NO: 280 - protein, 112 aa, Artificial Sequence
  Description of Artificial Sequence: Synthetic polypeptide
QSVLTQPPSVSGAPGQRVTISCTGSSSNIGAGYDVHWYQQLPGTAPKLLIYGNSNRPSGVPDRFSGSKSGTSASLAITGLQAEDEADYYCQSYDSSLSGYVFGTGTKVTVLG

SEQ ID NO: 281 - protein, 251 aa, Artificial Sequence
  Description of Artificial Sequence: Synthetic polypeptide
QSVLTQPPSVSGAPGQRVTISCTGSSSNIGAGYDVHWYQQLPGTAPKLLIYGNSNRPSGVPDRFSGSKSGTSASLAITGLQAEDEADYYCQSYDSSLSGYVFGTGTKVTVLGSRGGGGSGGGGSGGGGSLEMAQVQLVQSGAEVKKPGSSVKVSCKASGGTFSSYAISWVRQAPGQGLEWMGGIIPIFGKGNYPQKFQGRVTITADESTGTAYMELSSLRSEDTAVYYCARHIPTFSFDYWGQGTLVTVSS

SEQ ID NO: 282 - protein, 8 aa, Artificial Sequence
  Description of Artificial Sequence: Synthetic peptide
GGTFSSYT

SEQ ID NO: 283 - protein, 8 aa, Artificial Sequence
  Description of Artificial Sequence: Synthetic peptide
FIPISGTV

SEQ ID NO: 284 - protein, 10 aa, Artificial Sequence
  Description of Artificial Sequence: Synthetic peptide
ARPLDWTEDI

SEQ ID NO: 285 - protein, 117 aa, Artificial Sequence
  Description of Artificial Sequence: Synthetic polypeptide
QVQLVQSGAEVKKPGSSVKVSCKASGGTFSSYTINWVRQAPGQGLEWMGGFIPISGTVNYAQKFQGRVTITADESTSTAYMELSSLRSEDTAVYYCARPLDWTEDIWGQGTLVTVSS

SEQ ID NO: 286 - protein, 9 aa, Artificial Sequence
  Description of Artificial Sequence: Synthetic peptide
SSNIGAGYD

SEQ ID NO: 287 - protein, 3 aa, Artificial Sequence
  Description of Artificial Sequence: Synthetic peptide
GNS

SEQ ID NO: 288 - protein, 11 aa, Artificial Sequence
  Description of Artificial Sequence: Synthetic peptide
QSYDSSLSGSV

SEQ ID NO: 289 - protein, 112 aa, Artificial Sequence
  Description of Artificial Sequence: Synthetic polypeptide
QSVLTQPPSVSGAPGQRVTISCTGSSSNIGAGYDVHWYQQLPGTAPKLLIYGNSNRPSGVPDRFSGSKSGTSASLAITGLQAEDEADYYCQSYDSSLSGSVFGTGTKVTVLG

SEQ ID NO: 290 - protein, 249 aa, Artificial Sequence
  Description of Artificial Sequence: Synthetic polypeptide
QSVLTQPPSVSGAPGQRVTISCTGSSSNIGAGYDVHWYQQLPGTAPKLLIYGNSNRPSGVPDRFSGSKSGTSASLAITGLQAEDEADYYCQSYDSSLSGSVFGTGTKVTVLGSRGGGGSGGGGSGGGGSLEMAVQLVQSGAEVKKPGSSVKVSCKASGGTFSSYTINWVRQAPGQGLEWMGGFIPISGTVNYAQKFQGRVTITADESTSTAYMELSSLRSEDTAVYYCARPLDWTEDIWGQGTLVTVSS

SEQ ID NO: 291 - protein, 8 aa, Artificial Sequence
  Description of Artificial Sequence: Synthetic peptide
GYTFTAYY

SEQ ID NO: 292 - protein, 8 aa, Artificial Sequence
  Description of Artificial Sequence: Synthetic peptide
MNTNNGAT

SEQ ID NO: 293 - protein, 12 aa, Artificial Sequence
  Description of Artificial Sequence: Synthetic peptide
ARGDISQDFADV

SEQ ID NO: 294 - protein, 119 aa, Artificial Sequence
  Description of Artificial Sequence: Synthetic polypeptide
EVQLVQSGAEVKKPGASVKVSCKASGYTFTAYYLHWLRQAPGQGLEWMGWMNTNNGATRYAQKFQDRVTMTRDTSINTAYMEMSGLSSDDTAMYYCARGDISQDFADVWGQGTLVTVSS

SEQ ID NO: 295 - protein, 8 aa, Artificial Sequence
  Description of Artificial Sequence: Synthetic peptide
SGSIASNY

SEQ ID NO: 296 - protein, 3 aa, Artificial Sequence
  Description of Artificial Sequence: Synthetic peptide
EDN

SEQ ID NO: 297 - protein, 10 aa, Artificial Sequence
  Description of Artificial Sequence: Synthetic peptide
QSYDDINHWV

SEQ ID NO: 298 - protein, 112 aa, Artificial Sequence
  Description of Artificial Sequence: Synthetic polypeptide
NFMLTQPHSVSESPGKTVTISCTGSSGSIASNYVQWYQQRPGSAPTILIYEDNKRPSGVPDRFSGSIDSSSNSASLTISGLKTGDEADYYCQSYDDINHWVFGGGTKLTVLG

SEQ ID NO: 299 - protein, 252 aa, Artificial Sequence
  Description of Artificial Sequence: Synthetic polypeptide
NFMLTQPHSVSESPGKTVTISCTGSSGSIASNYVQWYQQRPGSAPTILIYEDNKRPSGVPDRFSGSIDSSSNSASLTISGLKTGDEADYYCQSYDDINHWVFGGGTKLTVLGSRGGGGSGGGGSGGGGSLEMAEVQLVQSGAEVKKPGASVKVSCKASGYTFTAYYLHWLRQAPGQGLEWMGWMNTNNGATRYAQKFQDRVTMTRDTSINTAYMEMSGLSSDDTAMYYCARGDISQDFADVWGQGTLVTVSS

SEQ ID NO: 300 - protein, 8 aa, Artificial Sequence
  Description of Artificial Sequence: Synthetic peptide
GYTFTAYY

SEQ ID NO: 301 - protein, 8 aa, Artificial Sequence
  Description of Artificial Sequence: Synthetic peptide
MNTNNGAT

SEQ ID NO: 302 - protein, 12 aa, Artificial Sequence
  Description of Artificial Sequence: Synthetic peptide
ARGDISQDFADV

SEQ ID NO: 303 - protein, 119 aa, Artificial Sequence; identical to SEQ ID NO: 294
  Description of Artificial Sequence: Synthetic polypeptide

SEQ ID NO: 304 - protein, 8 aa, Artificial Sequence
  Description of Artificial Sequence: Synthetic peptide
SGSIASNY

SEQ ID NO: 305 - protein, 3 aa, Artificial Sequence
  Description of Artificial Sequence: Synthetic peptide
EDN

SEQ ID NO: 306 - protein, 10 aa, Artificial Sequence
  Description of Artificial Sequence: Synthetic peptide
QSYDDINHWV

SEQ ID NO: 307 - protein, 112 aa, Artificial Sequence; identical to SEQ ID NO: 298
  Description of Artificial Sequence: Synthetic polypeptide

SEQ ID NO: 308 - protein, 252 aa, Artificial Sequence; identical to SEQ ID NO: 299
  Description of Artificial Sequence: Synthetic polypeptide

SEQ ID NO: 309 - protein, 8 aa, Artificial Sequence
  Description of Artificial Sequence: Synthetic peptide
GGSFSGYY

SEQ ID NO: 310 - protein, 7 aa, Artificial Sequence
  Description of Artificial Sequence: Synthetic peptide
VNHSGNT

SEQ ID NO: 311 - protein, 10 aa, Artificial Sequence
  Description of Artificial Sequence: Synthetic peptide
ARYFPPMIDV

SEQ ID NO: 312 - protein, 116 aa, Artificial Sequence
  Description of Artificial Sequence: Synthetic polypeptide
QVQLQQWGAGLLKPSETLSLTCAVYGGSFSGYYWSWIRQSPGKGLEWIGEVNHSGNTNYNPSLKSRVTISLDTSKNQFSLKLNSVTAADTAVYYCARYFPPMIDVWGQGTLVTVSS

SEQ ID NO: 313 - protein, 8 aa, Artificial Sequence
  Description of Artificial Sequence: Synthetic peptide
SSNIENNY

SEQ ID NO: 314 - protein, 3 aa, Artificial Sequence
  Description of Artificial Sequence: Synthetic peptide
DNN

SEQ ID NO: 315 - protein, 11 aa, Artificial Sequence
  Description of Artificial Sequence: Synthetic peptide
GTWDSSLSAYV

SEQ ID NO: 316 - protein, 112 aa, Artificial Sequence
  Description of Artificial Sequence: Synthetic polypeptide
GQSVVTQPPSVSAAPGQKVTISCSGSSSNIENNYVSWYQQLPGTAPKLLIYDNNKRPSGIPDRFSGSKSGTSATLGITGLQTGDEADYYCGTWDSSLSAYVFGTGTKVTVLG

SEQ ID NO: 317 - protein, 248 aa, Artificial Sequence
  Description of Artificial Sequence: Synthetic polypeptide
QSVVTQPPSVSAAPGQKVTISCSGSSSNIENNYVSWYQQLPGTAPKLLIYDNNKRPSGIPDRFSGSKSGTSATLGITGLQTGDEADYYCGTWDSSLSAYVFGTGTKVTVLGSRGGGGSGGGGSGGGGSLEMAQVQLQQWGAGLLKPSETLSLTCAVYGGSFSGYYWSWIRQSPGKGLEWIGEVNHSGNTNYNPSLKSRVTISLDTSKNQFSLKLNSVTAADTAVYYCARYFPPMIDVWGQGTLVTVSS

SEQ ID NO: 318 - protein, 10 aa, Artificial Sequence
  Description of Artificial Sequence: Synthetic peptide
GGSISSSSYY

SEQ ID NO: 319 - protein, 7 aa, Artificial Sequence
  Description of Artificial Sequence: Synthetic peptide
INHSGST

SEQ ID NO: 320 - protein, 14 aa, Artificial Sequence
  Description of Artificial Sequence: Synthetic peptide
ARYSHHVDSGGYDV

SEQ ID NO: 321 - protein, 122 aa, Artificial Sequence
  Description of Artificial Sequence: Synthetic polypeptide
QLQLQESGPGLVKPSETLSLSCTVSGGSISSSSYYWGWIRQPPGKGLEWIGEINHSGSTNYNPSLKSRVTISVDTSKNQFSLKLSSVTAADTAVYYCARYSHHVDSGGYDVWGQGTLVTVSS

SEQ ID NO: 322 - protein, 8 aa, Artificial Sequence
  Description of Artificial Sequence: Synthetic peptide
SSNIGNNY

SEQ ID NO: 323 - protein, 3 aa, Artificial Sequence
  Description of Artificial Sequence: Synthetic peptide
DNN

SEQ ID NO: 324 - protein, 11 aa, Artificial Sequence
  Description of Artificial Sequence: Synthetic peptide
GTWDSSLSAVV

SEQ ID NO: 325 - protein, 111 aa, Artificial Sequence
  Description of Artificial Sequence: Synthetic polypeptide
QSVVTQPPSVSAAPGQKVTISCSGSSSNIGNNYVSWYQQLPRTAPRLLIYDNNKRPSGIPDRFSASKSGTSATLGITGLQTGDEADYYCGTWDSSLSAVVFGGGTKLTVLG

SEQ ID NO: 326 - protein, 254 aa, Artificial Sequence
  Description of Artificial Sequence: Synthetic polypeptide
QSVVTQPPSVSAAPGQKVTISCSGSSSNIGNNYVSWYQQLPRTAPRLLIYDNNKRPSGIPDRFSASKSGTSATLGITGLQTGDEADYYCGTWDSSLSAVVFGGGTKLTVLGSRGGGGSGGGGSGGGGSLEMAQLQLQESGPGLVKPSETLSLSCTVSGGSISSSSYYWGWIRQPPGKGLEWIGEINHSGSTNYNPSLKSRVTISVDTSKNQFSLKLSSVTAADTAVYYCARYSHHVDSGGYDVWGQGTLVTVSS

SEQ ID NO: 327 - protein, 8 aa, Artificial Sequence
  Description of Artificial Sequence: Synthetic peptide
GGTFSSYG

SEQ ID NO: 328 - protein, 8 aa, Artificial Sequence
  Description of Artificial Sequence: Synthetic peptide
IIPIFGTP

SEQ ID NO: 329 - protein, 10 aa, Artificial Sequence
  Description of Artificial Sequence: Synthetic peptide
ARSYYGYFDG

SEQ ID NO: 330 - protein, 117 aa, Artificial Sequence
  Description of Artificial Sequence: Synthetic polypeptide
EVQLVESGAEVKEPGSSVKVSCKASGGTFSSYGISWIRQAPGQGLEWMGEIIPIFGTPNYAQKFQGRVTITADESTSTAYVELSSLRSDDTAVYYCARSYYGYFDGWGQGTLVTVSS

SEQ ID NO: 331 - protein, 6 aa, Artificial Sequence
  Description of Artificial Sequence: Synthetic peptide
QDISNY

SEQ ID NO: 332 - protein, 3 aa, Artificial Sequence
  Description of Artificial Sequence: Synthetic peptide
DAS

SEQ ID NO: 333 - protein, 9 aa, Artificial Sequence
  Description of Artificial Sequence: Synthetic peptide
QQYKSYPLT

SEQ ID NO: 334 - protein, 108 aa, Artificial Sequence
  Description of Artificial Sequence: Synthetic polypeptide
DIQMTQSPSSLSASVGDRVTITCQASQDISNYLNWYQQKPGKAPKLLIYDASNLETGVPSRFSGSGSGTDFTFTISSLQPDDFATYYCQQYKSYPLTFGGGTKVEIKR

SEQ ID NO: 335 - protein, 246 aa, Artificial Sequence
  Description of Artificial Sequence: Synthetic polypeptide
DIQMTQSPSSLSASVGDRVTITCQASQDISNYLNWYQQKPGKAPKLLIYDASNLETGVPSRFSGSGSGTDFTFTISSLQPDDFATYYCQQYKSYPLTFGGGTKVEIKRSRGGGGSGGGGSGGGGSLEMAEVQLVESGAEVKEPGSSVKVSCKASGGTFSSYGISWIRQAPGQGLEWMGEIIPIFGTPNYAQKFQGRVTITADESTSTAYVELSSLRSDDTAVYYCARSYYGYFDGWGQGTLVTVSS

SEQ ID NO: 336 - protein, 8 aa, Artificial Sequence
  Description of Artificial Sequence: Synthetic peptide
GYTFTSYY

SEQ ID NO: 337 - protein, 8 aa, Artificial Sequence
  Description of Artificial Sequence: Synthetic peptide
INPSGGST

SEQ ID NO: 338 - protein, 11 aa, Artificial Sequence
  Description of Artificial Sequence: Synthetic peptide
ARSMYQYFLDS

SEQ ID NO: 339 - protein, 118 aa, Artificial Sequence
  Description of Artificial Sequence: Synthetic polypeptide
EVQLVESGAEVKKPGASVKISCKASGYTFTSYYMHWVRQAPGQGLEWMGIINPSGGSTSYAQKFQGRVTMTRDTSTSTVYMELSSLRSEDTAVYYCARSMYQYFLDSWGQGTLVTVSS

SEQ ID NO: 340 - protein, 9 aa, Artificial Sequence
  Description of Artificial Sequence: Synthetic peptide
SSNIGAGYD

SEQ ID NO: 341 - protein, 3 aa, Artificial Sequence
  Description of Artificial Sequence: Synthetic peptide
GNI

SEQ ID NO: 342 - protein, 9 aa, Artificial Sequence
  Description of Artificial Sequence: Synthetic peptide
QSYDSNLSG

SEQ ID NO: 343 - protein, 112 aa, Artificial Sequence
  Description of Artificial Sequence: Synthetic polypeptide
QSVVTQPPSVSGAPGQRVTISCTGSSSNIGAGYDVHWYQQLPGTAPKLLIYGNINRPSGVPDRFSGSKSGTSASLAITGLQAEDEADYYCQSYDSNLSGYVFATGTKVTVLG

SEQ ID NO: 344 - protein, 251 aa, Artificial Sequence
  Description of Artificial Sequence: Synthetic polypeptide
QSVVTQPPSVSGAPGQRVTISCTGSSSNIGAGYDVHWYQQLPGTAPKLLIYGNINRPSGVPDRFSGSKSGTSASLAITGLQAEDEADYYCQSYDSNLSGYVFATGTKVTVLGSRGGGGSGGGGSGGGGSLEMAEVQLVESGAEVKKPGASVKISCKASGYTFTSYYMHWVRQAPGQGLEWMGIINPSGGSTSYAQKFQGRVTMTRDTSTSTVYMELSSLRSEDTAVYYCARSMYQYFLDSWGQGTLVTVSS

SEQ ID NO: 345 - protein, 10 aa, Homo sapiens
LTDAVKVMDL

SEQ ID NO: 346 - protein, 9 aa, Homo sapiens
KLQCVDLHV

SEQ ID NO: 347 - protein, 10 aa, Homo sapiens
VISNDVCAQV

SEQ ID NO: 348 - protein, 10 aa, Homo sapiens
FLTPKKLQCV

SEQ ID NO: 349 - protein, 9 aa, Homo sapiens
ALQCVDLHV

SEQ ID NO: 350 - protein, 9 aa, Homo sapiens
KLACVDLHV

SEQ ID NO: 351 - protein, 9 aa, Homo sapiens
KLQAVDLHV

SEQ ID NO: 352 - protein, 9 aa, Homo sapiens
KLQCADLHV

SEQ ID NO: 353 - protein, 9 aa, Homo sapiens
KLQCVALHV

SEQ ID NO: 354 - protein, 9 aa, Homo sapiens
KLQCVDAHV

SEQ ID NO: 355 - protein, 9 aa, Homo sapiens
KLQCVDLAV

SEQ ID NO: 356 - protein, 8 aa, Artificial Sequence
  Description of Artificial Sequence: Synthetic peptide
GGTFSSYA

SEQ ID NO: 357 - protein, 8 aa, Artificial Sequence
  Description of Artificial Sequence: Synthetic peptide
GFTFSSYA

SEQ ID NO: 358 - protein, 8 aa, Artificial Sequence
  Description of Artificial Sequence: Synthetic peptide
GYNFLNYG

SEQ ID NO: 359 - protein, 8 aa, Artificial Sequence
  Description of Artificial Sequence: Synthetic peptide
GYTFTGYY

SEQ ID NO: 360 - protein, 8 aa, Artificial Sequence
  Description of Artificial Sequence: Synthetic peptide
GGSFSDYY

SEQ ID NO: 361 - protein, 8 aa, Artificial Sequence
  Description of Artificial Sequence: Synthetic peptide
GYTFTSYG

SEQ ID NO: 362 - protein, 8 aa, Artificial Sequence
  Description of Artificial Sequence: Synthetic peptide
GGTFSSYA

SEQ ID NO: 363 - protein, 8 aa, Artificial Sequence
  Description of Artificial Sequence: Synthetic peptide
GYTFTSYG

SEQ ID NO: 364 - protein, 8 aa, Artificial Sequence
  Description of Artificial Sequence: Synthetic peptide
GYTFTSYY

SEQ ID NO: 365 - protein, 8 aa, Artificial Sequence
  Description of Artificial Sequence: Synthetic peptide
GYTFTGYF

SEQ ID NO: 366 - protein, 8 aa, Artificial Sequence
  Description of Artificial Sequence: Synthetic peptide
GGTFSSYA

SEQ ID NO: 367 - protein, 8 aa, Artificial Sequence
  Description of Artificial Sequence: Synthetic peptide
GYSFTSYW

SEQ ID NO: 368 - protein, 8 aa, Artificial Sequence
  Description of Artificial Sequence: Synthetic peptide
GYSFTSYW

SEQ ID NO: 369 - protein, 8 aa, Artificial Sequence
  Description of Artificial Sequence: Synthetic peptide
GYSFTSYR

SEQ ID NO: 370 - protein, 8 aa, Artificial Sequence
  Description of Artificial Sequence: Synthetic peptide
GYTFTNYG

SEQ ID NO: 371 - protein, 8 aa, Artificial Sequence
  Description of Artificial Sequence: Synthetic peptide
IIPIPGIT

SEQ ID NO: 372 - protein, 8 aa, Artificial Sequence
  Description of Artificial Sequence: Synthetic peptide
ISGSGGST

SEQ ID NO: 373 - protein, 8 aa, Artificial Sequence
  Description of Artificial Sequence: Synthetic peptide
ISTYTGNT

SEQ ID NO: 374 - protein, 8 aa, Artificial Sequence
  Description of Artificial Sequence: Synthetic peptide
FDPEDGET

SEQ ID NO: 375 - protein, 7 aa, Artificial Sequence
  Description of Artificial Sequence: Synthetic peptide
INHSGGT

SEQ ID NO: 376 - protein, 8 aa, Artificial Sequence
  Description of Artificial Sequence: Synthetic peptide
ISAYNGNT

SEQ ID NO: 377 - protein, 8 aa, Artificial Sequence
  Description of Artificial Sequence: Synthetic peptide
INPNSGGT

SEQ ID NO: 378 - protein, 8 aa, Artificial Sequence
  Description of Artificial Sequence: Synthetic peptide
ISAYNGNT

SEQ ID NO: 379 - protein, 8 aa, Artificial Sequence
  Description of Artificial Sequence: Synthetic peptide
FDPEDGET

SEQ ID NO: 380 - protein, 8 aa, Artificial Sequence
  Description of Artificial Sequence: Synthetic peptide
FDPEDGET

SEQ ID NO: 381 - protein, 8 aa, Artificial Sequence
  Description of Artificial Sequence: Synthetic peptide
IIPILGIA

SEQ ID NO: 382 - protein, 8 aa, Artificial Sequence
  Description of Artificial Sequence: Synthetic peptide
IYPGDSDT

SEQ ID NO: 383 - protein, 8 aa, Artificial Sequence
  Description of Artificial Sequence: Synthetic peptide
IYPGDSDT

SEQ ID NO: 384 - protein, 8 aa, Artificial Sequence
  Description of Artificial Sequence: Synthetic peptide
IDPSDSYT

SEQ ID NO: 385 - protein, 13 aa, Artificial Sequence
  Description of Artificial Sequence: Synthetic peptide
ARSYKWGSSLVDA

SEQ ID NO: 386 - protein, 13 aa, Artificial Sequence
  Description of Artificial Sequence: Synthetic peptide
ARNYYSQYWMMDL

SEQ ID NO: 387 - protein, 11 aa, Artificial Sequence
  Description of Artificial Sequence: Synthetic peptide
ARSSEYYTWDH

SEQ ID NO: 388 - protein, 7 aa, Artificial Sequence
  Description of Artificial Sequence: Synthetic peptide
ARYGFDY

SEQ ID NO: 389 - protein, 12 aa, Artificial Sequence
  Description of Artificial Sequence: Synthetic peptide
ARYNEYGSGYDK

SEQ ID NO: 390 - protein, 11 aa, Artificial Sequence
  Description of Artificial Sequence: Synthetic peptide
ARSSQYYVWDS

SEQ ID NO: 391 - protein, 16 aa, Artificial Sequence
  Description of Artificial Sequence: Synthetic peptide
ARWSYYYFQQFWSLDG

SEQ ID NO: 392 - protein, 10 aa, Artificial Sequence
  Description of Artificial Sequence: Synthetic peptide
ARTNYNKYDI

SEQ ID NO: 393 - protein, 7 aa, Artificial Sequence
  Description of Artificial Sequence: Synthetic peptide
ARYSYDY

SEQ ID NO: 394 - protein, 7 aa, Artificial Sequence
  Description of Artificial Sequence: Synthetic peptide
ARYSYDL

SEQ ID NO: 395 - protein, 15 aa, Artificial Sequence
  Description of Artificial Sequence: Synthetic peptide
ARVSQPVYGSSTYDI

SEQ ID NO: 396 - protein, 11 aa, Artificial Sequence
  Description of Artificial Sequence: Synthetic peptide
ARLVVPDAFDI

SEQ ID NO: 397 - protein, 14 aa, Artificial Sequence
  Description of Artificial Sequence: Synthetic peptide
ARWGSRGFLDAFDI

SEQ ID NO: 398 - protein, 15 aa, Artificial Sequence
  Description of Artificial Sequence: Synthetic peptide
ARWGLSWDGWGVTDY

SEQ ID NO: 399 - protein, 7 aa, Artificial Sequence
  Description of Artificial Sequence: Synthetic peptide
ARYNYDT

SEQ ID NO: 400 - protein, 10 aa, Artificial Sequence
  Description of Artificial Sequence: Synthetic peptide
ARSFGAGYDS

SEQ ID NO: 401 - protein, 7 aa, Artificial Sequence
  Description of Artificial Sequence: Synthetic peptide
ARYPWDH

SEQ ID NO: 402 - protein, 12 aa, Artificial Sequence
  Description of Artificial Sequence: Synthetic peptide
ARSSYYGYLSDG

SEQ ID NO: 403 - protein, 120 aa, Artificial Sequence
  Description of Artificial Sequence: Synthetic polypeptide
EVQLVQSGAEVKRPGSSVKVSCKASGGTFSSYAINWVRRAPGQGLEWMGKIIPIPGITNYAQKFQDRVTFTADTSTNIAYMELSSLRSEDTAMYYCARSYKWGSSLVDAWGQGTLVTVSS

SEQ ID NO: 404 - protein, 120 aa, Artificial Sequence
  Description of Artificial Sequence: Synthetic polypeptide
EVQLVESGGGLVQPGGSLRLSCAASGFTFSSYAMSWVRQAPGKGLEWVSAISGSGGSTYYADSVKGRFTISRDNSKNTLYLQMNSLRAEDTAVYYCARNYYSQYWMMDLWGQGTLVTVSS

SEQ ID NO: 405 - protein, 118 aa, Artificial Sequence
  Description of Artificial Sequence: Synthetic polypeptide
QVQLVQSGAEVKKPGDSVKVSCKPSGYNFLNYGINWVRQAPGQGLEWMGWISTYTGNTNYAQKLQGRVTFTTDTSTSTAYMEMRSLRSDDTAVYYCARSSEYYTWDHWGQGTLVTVSS

SEQ ID NO: 406 - protein, 114 aa, Artificial Sequence
  Description of Artificial Sequence: Synthetic polypeptide
EVQLVQSGAEVKKPGASVKVSCKASGYTFTGYYIHWVRQAPGQGLEWMGGFDPEDGETIYAQKFQDRVTMTADTSTDTAYMELSSLRSEDTAVYYCARYGFDYWGQGTLVTVSS

SEQ ID NO: 407 - protein, 118 aa, Artificial Sequence
  Description of Artificial Sequence: Synthetic polypeptide
QVQLQQWGAGLLKPSETLSLTCAVKGGSFSDYYWSWIRQPPGKGLEWIGEINHSGGTNYNPSLKSRVTISVDTSKNQFSLKLLSVTAADTAVYYCARYNEYGSGYDKWGQGTLVTVSS

SEQ ID NO: 408 - protein, 118 aa, Artificial Sequence
  Description of Artificial Sequence: Synthetic polypeptide
QVQLVQSGAEVKKPGASVKVSCKASGYTFTSYGISWVRQAPGQGLEWMGWISAYNGNTNYAQKLQGRVTMTTDTSTSTAYMELRSLRSDDTAVYYCARSSQYYVWDSWGQGTLVTVSS

SEQ ID NO: 409 - protein, 123 aa, Artificial Sequence
  Description of Artificial Sequence: Synthetic polypeptide
QVQLVQSGAEVKKPGSSVKVSCKASGGTFSSYAISWVRQAPGQGLEWMGWINPNSGGTNYAQKFQGRVTMTRDTSISTAYMELSRLRSDDTAVYYCARWSYYYFQQFWSLDGWGQGTLVTVSS

SEQ ID NO: 410 - protein, 117 aa, Artificial Sequence
  Description of Artificial Sequence: Synthetic polypeptide
QMQLVQSGSEVKKPGASVKVSCKASGYTFTSYGISWVRQAPGQGLEWMGWISAYNGNTDYVQKLQGRVTMTTDTSTNTAYMELGSLGSDDTAVYYCARTNYNKYDIWGQGTLVTVSS

SEQ ID NO: 411 - protein, 114 aa, Artificial Sequence
  Description of Artificial Sequence: Synthetic polypeptide
QVQLVQSGAEVKKPGASVKVSCKASGYTFTSYYMHWVRQAPGQGLEWMGGFDPEDGETIYAQKFQGRVTMTEDTSTDTAYMGLSSLRSEDTAVYYCARYSYDYWGQGTLVTVSS

SEQ ID NO: 412 - protein, 114 aa, Artificial Sequence
  Description of Artificial Sequence: Synthetic polypeptide
EVQLVQSGAEVKKPGASVKVSCKASGYTFTGYFMHWVRQAPGQGLEWMGGFDPEDGETIYAQKFQGRVTMTEDTSTDTAYMELSSLRSEDTAVYYCARYSYDLWGQGTLVTVSS

SEQ ID NO: 413 - protein, 122 aa, Artificial Sequence
  Description of Artificial Sequence: Synthetic polypeptide
QVQLVQSGAEVKKPGSSVKVSCKASGGTFSSYAISWVRQAPGQGLEWMGRIIPILGIANYAQKFQGRVTITADKSTSTAYMELSSLRSEDTAVYYCARVSQPVYGSSTYDIWGQGTLVTVSS

SEQ ID NO: 414 - protein, 118 aa, Artificial Sequence
  Description of Artificial Sequence: Synthetic polypeptide
QMQLVQSGAEVKKPGESLKISCKGSGYSFTSYWIGWVRQMPGKGLEWMGIIYPGDSDTRYSPSFQGQVTISADKSISTAYLQWSSLKASDTAMYYCARLVVPDAFDIWGQGTMVTVSS

SEQ ID NO: 415 - protein, 121 aa, Artificial Sequence
  Description of Artificial Sequence: Synthetic polypeptide
QVQLVQSGAEVKKPGESLKISCKGSGYSFTSYWIGWVRQMPGKGLEWMGIIYPGDSDTRYSPSFQGQVTISADKSISTAYLQWSSLKASDTAMYYCARWGSRGFLDAFDIWGQGTMVTVSS

SEQ ID NO: 416 - protein, 122 aa, Artificial Sequence
  Description of Artificial Sequence: Synthetic polypeptide
EVQLVQSGAEVKKPGESLKISCKGSGYSFTSYRIGWVRQMPGKGLEWMGIIYPGDSDTRYSPSFQGQVTISADKSISTAYLQWSSLKASDTAMYYCARWGLSWDGWGVTDYWGQGTLVTVSS

SEQ ID NO: 417 - protein, 114 aa, Artificial Sequence
  Description of Artificial Sequence: Synthetic polypeptide
QVQLVQSGAEVKKPGASVKVSCKASGYTFTSYYMHWVRQAPGKGLEWMGGFDPEDGETIYAQKFQGRVTMTEDTSTDTAYMELSSLRSEDTAVYYCARYNYDTWGQGTLVTVSS

SEQ ID NO: 418 - protein, 117 aa, Artificial Sequence
  Description of Artificial Sequence: Synthetic polypeptide
EVQLVQSGAEVKKPGESLKISCKGSGYSFTSYWIGWVRQMPGKGLEWMGRIDPSDSYTNYSPSFQGHVTISADKSISTAYLQWSSLKASDTAMYYCARSFGAGYDSWGQGTLVTVSS

SEQ ID NO: 419 - protein, 114 aa, Artificial Sequence
  Description of Artificial Sequence: Synthetic polypeptide
QVQLVQSGAEVKKPGASVKVSCKASGYTFTSYYMHWVRQAPGKGLEWMGGFDPEDGETIYAQKFQGRVTMTEDTSTDTAYMELSSLRSEDTAVYYCARYPWDHWGQGTLVTVSS

SEQ ID NO: 420 - protein, 119 aa, Artificial Sequence
  Description of Artificial Sequence: Synthetic polypeptide
QVQLVQSGAEVKKPGASVKVSCKTSGYTFTNYGISWVRQAPGQGLEWMGWISAYNGNTNYAQNLQGRVTMTTDTSTSTAYMELRSLRSDDTAVYYCARSSYYGYLSDGWGQGTLVTVSS

SEQ ID NO: 421 - protein, 8 aa, Artificial Sequence
  Description of Artificial Sequence: Synthetic peptide
NSNIGSNT

SEQ ID NO: 422 - protein, 9 aa, Artificial Sequence
  Description of Artificial Sequence: Synthetic peptide
SSNFGAGYD

SEQ ID NO: 423 - protein, 9 aa, Artificial Sequence
  Description of Artificial Sequence: Synthetic peptide
SSNIGAGYD

SEQ ID NO: 424 - protein, 9 aa, Artificial Sequence
  Description of Artificial Sequence: Synthetic peptide
TGAVTSGYY

SEQ ID NO: 425 - protein, 8 aa, Artificial Sequence
  Description of Artificial Sequence: Synthetic peptide
SYNIGNNY

SEQ ID NO: 426 - protein, 9 aa, Artificial Sequence
  Description of Artificial Sequence: Synthetic peptide
SSNFGAGYD

SEQ ID NO: 427 - protein, 8 aa, Artificial Sequence
  Description of Artificial Sequence: Synthetic peptide
SSNIGSNT

SEQ ID NO: 428 - protein, 9 aa, Artificial Sequence
  Description of Artificial Sequence: Synthetic peptide
SSNIGAGYD

SEQ ID NO: 429 - protein, 9 aa, Artificial Sequence
  Description of Artificial Sequence: Synthetic peptide
TGAVTSGYY

SEQ ID NO: 430 - protein, 9 aa, Artificial Sequence
  Description of Artificial Sequence: Synthetic peptide
TGAVTSGYY

SEQ ID NO: 431 - protein, 8 aa, Artificial Sequence
  Description of Artificial Sequence: Synthetic peptide
SSNLGSNS

SEQ ID NO: 432 - protein, 8 aa, Artificial Sequence
  Description of Artificial Sequence: Synthetic peptide
SSNIGNNY

SEQ ID NO: 433 - protein, 8 aa, Artificial Sequence
  Description of Artificial Sequence: Synthetic peptide
SSNIGNNY

SEQ ID NO: 434 - protein, 6 aa, Artificial Sequence
  Description of Artificial Sequence: Synthetic peptide
QSISSY

SEQ ID NO: 435 - protein, 9 aa, Artificial Sequence
  Description of Artificial Sequence: Synthetic peptide
TGTVTSTYY

SEQ ID NO: 436 - protein, 9 aa, Artificial Sequence
  Description of Artificial Sequence: Synthetic peptide
SSDVGGYNY

SEQ ID NO: 437 - protein, 8 aa, Artificial Sequence
  Description of Artificial Sequence: Synthetic peptide
SSNIGTNY

SEQ ID NO: 438 - protein, 3 aa, Artificial Sequence
  Description of Artificial Sequence: Synthetic peptide
SNN

SEQ ID NO: 439 - protein, 3 aa, Artificial Sequence
  Description of Artificial Sequence: Synthetic peptide
GDT

SEQ ID NO: 440 - protein, 3 aa, Artificial Sequence
  Description of Artificial Sequence: Synthetic peptide
GNS

SEQ ID NO: 441 - protein, 3 aa, Artificial Sequence
  Description of Artificial Sequence: Synthetic peptide
TTG

SEQ ID NO: 442 - protein, 3 aa, Artificial Sequence
  Description of Artificial Sequence: Synthetic peptide
DNN

SEQ ID NO: 443 - protein, 3 aa, Artificial Sequence
  Description of Artificial Sequence: Synthetic peptide
GNS

SEQ ID NO: 444 - protein, 3 aa, Artificial Sequence
  Description of Artificial Sequence: Synthetic peptide
STS

SEQ ID NO: 445 - protein, 3 aa, Artificial Sequence
  Description of Artificial Sequence: Synthetic peptide
DNH

SEQ ID NO: 446 - protein, 3 aa, Artificial Sequence
  Description of Artificial Sequence: Synthetic peptide
DNY

SEQ ID NO: 447 - protein, 3 aa, Artificial Sequence
  Description of Artificial Sequence: Synthetic peptide
DND

SEQ ID NO: 448 - protein, 3 aa, Artificial Sequence
  Description of Artificial Sequence: Synthetic peptide
AAS

SEQ ID NO: 449 - protein, 3 aa, Artificial Sequence
  Description of Artificial Sequence: Synthetic peptide
DVS

SEQ ID NO: 450 - protein, 3 aa, Artificial Sequence
  Description of Artificial Sequence: Synthetic peptide
STN

SEQ ID NO: 451 - protein, 11 aa, Artificial Sequence
  Description of Artificial Sequence: Synthetic peptide
ATWDDSLNGPV

SEQ ID NO: 452 - protein, 11 aa, Artificial Sequence
  Description of Artificial Sequence: Synthetic peptide
QSYDTSLSGSV

SEQ ID NO: 453 - protein, 11 aa, Artificial Sequence
  Description of Artificial Sequence: Synthetic peptide
QSYDSSLSGWV

SEQ ID NO: 454 - protein, 9 aa, Artificial Sequence
  Description of Artificial Sequence: Synthetic peptide
LLYSGGVWV

SEQ ID NO: 455 - protein, 11 aa, Artificial Sequence
  Description of Artificial Sequence: Synthetic peptide
GTWESSLSAYV

SEQ ID NO: 456 - protein, 11 aa, Artificial Sequence
  Description of Artificial Sequence: Synthetic peptide
QSYDSSLSGWV

SEQ ID NO: 457 - protein, 12 aa, Artificial Sequence
  Description of Artificial Sequence: Synthetic peptide
AAWDDSLNGRWV

SEQ ID NO: 458 - protein, 10 aa, Artificial Sequence
  Description of Artificial Sequence: Synthetic peptide
QSYDSSLSEV

SEQ ID NO: 459 - protein, 9 aa, Artificial Sequence
  Description of Artificial Sequence: Synthetic peptide
LLYYGGAYV

SEQ ID NO: 460 - protein, 10 aa, Artificial Sequence
  Description of Artificial Sequence: Synthetic peptide
LLYYGGAQWV

SEQ ID NO: 461 - protein, 11 aa, Artificial Sequence
  Description of Artificial Sequence: Synthetic peptide
AAWDDSLNSVV

SEQ ID NO: 462 - protein, 11 aa, Artificial Sequence
  Description of Artificial Sequence: Synthetic peptide
GTWDSSLSAGV

SEQ ID NO: 463 - protein, 11 aa, Artificial Sequence
  Description of Artificial Sequence: Synthetic peptide
GTWDSSLSSGV

SEQ ID NO: 464 - protein, 9 aa, Artificial Sequence
  Description of Artificial Sequence: Synthetic peptide
QQSYSTPFT

SEQ ID NO: 465 - protein, 9 aa, Artificial Sequence
  Description of Artificial Sequence: Synthetic peptide
LVFYGGVWV

SEQ ID NO: 466 - protein, 10 aa, Artificial Sequence
  Description of Artificial Sequence: Synthetic peptide
SSYTSSSRYV

SEQ ID NO: 467 - protein, 9 aa, Artificial Sequence
  Description of Artificial Sequence: Synthetic peptide
LLYYGGQGV

SEQ ID NO: 468 - protein, 12 aa, Artificial Sequence
  Description of Artificial Sequence: Synthetic peptide
AAWDDSLSGLYV

SEQ ID NO: 469 - protein, 111 aa, Artificial Sequence
  Description of Artificial Sequence: Synthetic polypeptide
QSVLTQPPSASGTPGQRVTLSCSGSNSNIGSNTVNWYQQLPGTNPKLLIYSNNQRPSGVPDRFSGSKSGTSASLAISGLQSEDEADYYCATWDDSLNGPVFGGGTKLTVLG

SEQ ID NO: 470 - protein, 112 aa, Artificial Sequence
  Description of Artificial Sequence: Synthetic polypeptide
QSVLTQPPSVSGAPGQRVTISCTGSSSNFGAGYDVHWYQQLPGAAPKLLIYGDTNRPSGVPDRFSGSKSGTSASLAITGLQAEDEADYYCQSYDTSLSGSVFGGGTKLTVLG

SEQ ID NO: 471 - protein, 112 aa, Artificial Sequence
  Description of Artificial Sequence: Synthetic polypeptide
QSVLTQPPSVSGAPGQRVTISCTGSSSNIGAGYDVHWYQQLPGTAPKLLIYGNSNRPSGVPDRFSGSKSGTSASLAITGLQAEDEADYYCQSYDSSLSGWVFGGGTKLTVLG

SEQ ID NO: 472 - protein, 110 aa, Artificial Sequence
  Description of Artificial Sequence: Synthetic polypeptide
QAVVTQEPSLTVSPGGTVTLTCASSTGAVTSGYYPNWFQLKPGQAPRALIYTTGKKHSWAPARFSGSLLGGKAALTLSGVQPEDEAEYYCLLYSGGVWVFGGGTKLTVLG

SEQ ID NO: 473 - protein, 111 aa, Artificial Sequence
  Description of Artificial Sequence: Synthetic polypeptide
QSVLTQPPSVSAAPGQKVTISCSGSSYNIGNNYVSWYQQLPGTAPKLLIYDNNKRPSGIPDRFSGSKSGTSATLGITGLQTGDEAEYYCGTWESSLSAYVFGTGTKVTVLG

SEQ ID NO: 474 - protein, 112 aa, Artificial Sequence
  Description of Artificial Sequence: Synthetic polypeptide
QSVVTQPPSVSGAPGQRVTISCTGSSSNFGAGYDVHWYQQLPGTAPKLLIYGNSNRPSGVPDRFSGSKSGTSASLAITGLQAEDEADYYCQSYDSSLSGWVFGGGTKLTVLG

SEQ ID NO: 475 - protein, 112 aa, Artificial Sequence
  Description of Artificial Sequence: Synthetic polypeptide
QAVLTQPPSASGTPGQRVTISCSGSSSNIGSNTVNWYQQLPGTAPKLLIYSNNQRPSGVPDRFSGSKSGTSASLAISGLQSEDEADYYCAAWDDSLNGRWVFGGGTKLTVLG

SEQ ID NO: 476 - protein, 111 aa, Artificial Sequence
  Description of Artificial Sequence: Synthetic polypeptide
QSVLTQPPSVSGAPGQRVTISCTGSSSNIGAGYDVHWYQQLPGTAPKLLIYGNSNRPSGVPDRFSGSKSGTSASLAITGLQAEDEADYYCQSYDSSLSEVFGTGTKVTVLG

SEQ ID NO: 477 - protein, 110 aa, Artificial Sequence
  Description of Artificial Sequence: Synthetic polypeptide
QAVVTQEPSLTVSPGGTVTLTCASSTGAVTSGYYPNWFQQKPGQAPRALIYSTSNKHSWTPARFSGSLLGGKAALTLSGVQPEDEAEYYCLLYYGGAYVFGTGTKVTVLG

SEQ ID NO: 478 - protein, 111 aa, Artificial Sequence
  Description of Artificial Sequence: Synthetic polypeptide
QTVVTQEPSLTVSPGGTVTLTCASSTGAVTSGYYPNWFQQKPGQAPRALIYSTSNKHSWTPARFSGSLLGGKAALTLSGVQPEDEAEYYCLLYYGGAQWVFGGGTKLTVLG

SEQ ID NO: 479 - protein, 111 aa, Artificial Sequence
  Description of Artificial Sequence: Synthetic polypeptide
QAVLTQPPSASGTPGQRVTISCSGRSSNLGSNSVNWYQQVPGTAPKLLIFDNHQRPSGVPDRFSGSKSGTSASLAISGLRSEDETDYYCAAWDDSLNSVVFGGGTKLTVLG

SEQ ID NO: 480 - protein, 111 aa, Artificial Sequence
  Description of Artificial Sequence: Synthetic polypeptide
QSVVTQPPSVSAAPGQKVTISCSGSSSNIGNNYVSWYQQLPGTAPKLLIYDNYKRPSGIPDRFSGSKSGTSATLGITGLQTGDEADYYCGTWDSSLSAGVFGGGTKLTVLG

SEQ ID NO: 481 - protein, 111 aa, Artificial Sequence
  Description of Artificial Sequence: Synthetic polypeptide
QSVVTQPPSVSAAPGQRVTISCSGSSSNIGNNYVSWYQQLPGAAPRLLIYDNDKRPSGIPDRFSGSKSGTSATLGITGLQTGDEADYYCGTWDSSLSSGVFGGGTKLTVLG

SEQ ID NO: 482 - protein, 108 aa, Artificial Sequence
  Description of Artificial Sequence: Synthetic polypeptide
DIQLTQSPSSLSASVGDRVTITCRASQSISSYLNWYQQKPGKAPKLLIYAASSLQSGVPSRFSGSGSGTDFTLTISSLQPEDFATYYCQQSYSTPFTFGPGTKVDIKR

SEQ ID NO: 483 - protein, 110 aa, Artificial Sequence
  Description of Artificial Sequence: Synthetic polypeptide
QAVVTQEPSLTVSPGGTVTLTCASSTGTVTSTYYPNWFQQKPGQAPRALIYSTSNRHSWTPARFSGSLLGGKAALTVSGVQPDDEAEYYCLVFYGGVWVFGGGTKLTVLG

SEQ ID NO: 484 - protein, 111 aa, Artificial Sequence
  Description of Artificial Sequence: Synthetic polypeptide
QSALTQPASVSGSPGQSITISCTGTSSDVGGYNYVSWYQQHPGKAPKLMIYDVSKRPSGVSNRFSGSKSGNTASLTISGLQAEDEADYYCSSYTSSSRYVFGTGTKVTVLG

SEQ ID NO: 485 - protein, 110 aa, Artificial Sequence
  Description of Artificial Sequence: Synthetic polypeptide
QAVVTQEPSLTVSPGGTVTLTCASSTGAVTSGYYPNWFQQKPGQAPRPLIYSTNNKHSWTPARFSGSLLGGKAALTLSGVQPEDEAEYYCLLYYGGQGVFGGGTKLTVLG

SEQ ID NO: 486 - protein, 112 aa, Artificial Sequence
  Description of Artificial Sequence: Synthetic polypeptide
LPVLTQPPSASGTPGQRVTISCSGSSSNIGTNYVYWYQQLPGTAPKLLIYSNNQRPSGVPDRFSGSKSGTSASLAISGLRSEDEADYYCAAWDDSLSGLYVFGTGTKVTVLG

SEQ ID NO: 487 - protein, 254 aa, Artificial Sequence; identical to SEQ ID NO: 52
  Description of Artificial Sequence: Synthetic polypeptide

SEQ ID NO: 488 - protein, 249 aa, Artificial Sequence; identical to SEQ ID NO: 53
  Description of Artificial Sequence: Synthetic polypeptide

SEQ ID NO: 489 - protein, 23 aa, Homo sapiens
KNDAPVVQEPRRLSFRSTIYGSR

SEQ ID NO: 490 - protein, 15 aa, Homo sapiens
AANCIRIGIPMADPI

SEQ ID NO: 491 - protein, 19 aa, Homo sapiens
SSTGVLFVKFGPPPTASPG

SEQ ID NO: 492 - protein, 15 aa, Homo sapiens
SNPMILMRLKLPNCE

SEQ ID NO: 493 - protein, 10 aa, Artificial Sequence
  Description of Artificial Sequence: Synthetic peptide
GGSLSSHGVS

SEQ ID NO: 494 - protein, 17 aa, Artificial Sequence
  Description of Artificial Sequence: Synthetic peptide
RIIPMFGVTDYAQKFQD

SEQ ID NO: 495 - protein, 9 aa, Artificial Sequence
  Description of Artificial Sequence: Synthetic peptide
ESRGATFEY

SEQ ID NO: 496 - protein, 118 aa, Artificial Sequence
  Description of Artificial Sequence: Synthetic polypeptide
QVQLVQSGTEVKKPGSSVKVSCQASGGSLSSHGVSWLRQAPGQGLEWVGRIIPMFGVTDYAQKFQDRVTITADKSTSTVYMELISLGSDDTAVYFCARESRGATFEYWGQGTLVTVSS

SEQ ID NO: 497 - protein, 12 aa, Artificial Sequence
  Description of Artificial Sequence: Synthetic peptide
RASQSVSSSYLA

SEQ ID NO: 498 - protein, 7 aa, Artificial Sequence
  Description of Artificial Sequence: Synthetic peptide
GASSRAT

SEQ ID NO: 499 - protein, 6 aa, Artificial Sequence
  Description of Artificial Sequence: Synthetic peptide
QQYGSS

SEQ ID NO: 500 - protein, 106 aa, Artificial Sequence
  Description of Artificial Sequence: Synthetic polypeptide
EIVLTQSPGTLSLSPGERATLSCRASQSVSSSYLAWYQQKPGQAPRLLIYGASSRATGIPDRFSGSGSGTDFTLTISRLEPEDFAVYYCQQYGSSFGPGTKVDIKR

SEQ ID NO: 501 - protein, 12 aa, Artificial Sequence
  Description of Artificial Sequence: Synthetic peptide
GGSISSSSYYWG

SEQ ID NO: 502 - protein, 16 aa, Artificial Sequence
  Description of Artificial Sequence: Synthetic peptide
SIYYSGSTYYNPSLKS

SEQ ID NO: 503 - protein, 9 aa, Artificial Sequence
  Description of Artificial Sequence: Synthetic peptide
HDGTDAFDI

SEQ ID NO: 504 - protein, 119 aa, Artificial Sequence
  Description of Artificial Sequence: Synthetic polypeptide
QLQLQESGPGLVKPSETLSLTCTVSGGSISSSSYYWGWIRQPPGKGLEWIGSIYYSGSTYYNPSLKSRVTISVDTSKNQFSLKLGSVTAADTAVYYCARHDGTDAFDIWGQGTTVTVSS

SEQ ID NO: 505 - protein, 14 aa, Artificial Sequence
  Description of Artificial Sequence: Synthetic peptide
TGTSSDFGDYDYVS

SEQ ID NO: 506 - protein, 7 aa, Artificial Sequence
  Description of Artificial Sequence: Synthetic peptide
DVSDRPS

SEQ ID NO: 507 - protein, 10 aa, Artificial Sequence
  Description of Artificial Sequence: Synthetic peptide
SSLTTSSTLV

SEQ ID NO: 508 - protein, 111 aa, Artificial Sequence
  Description of Artificial Sequence: Synthetic polypeptide
QSVLTQPASVSGSPGQSITISCTGTSSDFGDYDYVSWYQQHPGKAPKLMIYDVSDRPSGVSNRFSGSKSGNTASLTISGLQAEDEADYFCSSLTTSSTLVFGGGTKLTVLG

SEQ ID NO: 509 - protein, 9 aa, Homo sapiens
QLSLLMWIT

SEQ ID NO: 510 - protein, 9 aa, Homo sapiens
SLLMWITQC

SEQ ID NO: 511 - protein, 11 aa, Homo sapiens
SLLMWITQCFL

SEQ ID NO: 512 - protein, 9 aa, Homo sapiens
SLLMWITQV

SEQ ID NO: 513 - protein, 9 aa, Homo sapiens
ALLMWITQC

SEQ ID NO: 514 - protein, 9 aa, Homo sapiens
SALMWITQC

SEQ ID NO: 515 - protein, 9 aa, Homo sapiens
SLAMWITQC

SEQ ID NO: 516 - protein, 9 aa, Homo sapiens
SLLAWITQC

SEQ ID NO: 517 - protein, 9 aa, Homo sapiens
SLLMAITQC

SEQ ID NO: 518 - protein, 9 aa, Homo sapiens
SLLMWATQC

SEQ ID NO: 519 - protein, 9 aa, Homo sapiens
SLLMWIAQC

SEQ ID NO: 520 - protein, 8 aa, Artificial Sequence
  Description of Artificial Sequence: Synthetic peptide
GDTFSSYS

SEQ ID NO: 521 - protein, 8 aa, Artificial Sequence
  Description of Artificial Sequence: Synthetic peptide
FIPNLNKG

SEQ ID NO: 522 - protein, 10 aa, Artificial Sequence
  Description of Artificial Sequence: Synthetic peptide
ARDWSYSIDY

SEQ ID NO: 523 - protein, 117 aa, Artificial Sequence
  Description of Artificial Sequence: Synthetic polypeptide
QVQLVQSGAEVKKPGSSVKVSCKASGDTFSSYSISWVRQAPGQGLEWMGRIIPILGIANYAQKYQGRVTLSADKSTSTSYMELNSLRSEDTAVYYCARDWSYSIDYWGQGTLVTVSS

SEQ ID NO: 524 - protein, 8 aa, Artificial Sequence
  Description of Artificial Sequence: Synthetic peptide
SSNIGNNY

SEQ ID NO: 525 - protein, 3 aa, Artificial Sequence
  Description of Artificial Sequence: Synthetic peptide
DNN

SEQ ID NO: 526 - protein, 11 aa, Artificial Sequence
  Description of Artificial Sequence: Synthetic peptide
GTWDSSLSAWV

SEQ ID NO: 527 - protein, 111 aa, Artificial Sequence
  Description of Artificial Sequence: Synthetic polypeptide
QSVVTQPPSVSAAPGQKVTISCSGSSSNIGNNYVSWYQQLPGTAPKLLIYDNNKRPSGIPDRFSGSKSGTSATLGITGLQTGDEADYYCGTWDSSLSAWVFGGGTKLTVLG

SEQ ID NO: 528 - protein, 8 aa, Artificial Sequence
  Description of Artificial Sequence: Synthetic peptide
GYTFTSYG

SEQ ID NO: 529 - protein, 8 aa, Artificial Sequence
  Description of Artificial Sequence: Synthetic peptide
ISAYNGNT

SEQ ID NO: 530 - protein, 11 aa, Artificial Sequence
  Description of Artificial Sequence: Synthetic peptide
ARYSGYYAGDS

SEQ ID NO: 531 - protein, 118 aa, Artificial Sequence
  Description of Artificial Sequence: Synthetic polypeptide
QVQLVQSGAEVKKPGASVKVSCKASGYTFTSYGISWVRQAPGQGLEWMGWISAYNGNTNYAQKLQGRVTMTTDTSTSTAYMELRSLRSDDTAVYYCARYSGYYAGDSWGQGTLVTVSS

SEQ ID NO: 532 - protein, 9 aa, Artificial Sequence
  Description of Artificial Sequence: Synthetic peptide
SSNIGAGYD

SEQ ID NO: 533 - protein, 3 aa, Artificial Sequence
  Description of Artificial Sequence: Synthetic peptide
GDT

SEQ ID NO: 534 - protein, 11 aa, Artificial Sequence
  Description of Artificial Sequence: Synthetic peptide
QSYDSNLYTYV

SEQ ID NO: 535 - protein, 112 aa, Artificial Sequence
  Description of Artificial Sequence: Synthetic polypeptide
QSVLTQPPSVSGAPGQRVTISCTGSSSNIGAGYDVHWYQQLPGTAPKLLIYGDTNRPSGVPDRISGSKSGTSASLAITGLQAEDEADYYCQSYDSNLYTYVFGTGTKVTVLG

SEQ ID NO: 536 - protein, 8 aa, Artificial Sequence
  Description of Artificial Sequence: Synthetic peptide
GYTFTSYG

SEQ ID NO: 537 - protein, 8 aa, Artificial Sequence
  Description of Artificial Sequence: Synthetic peptide
FIPNLNKG

SEQ ID NO: 538 - protein, 9 aa, Artificial Sequence
  Description of Artificial Sequence: Synthetic peptide
ARGDYGSDQ

SEQ ID NO: 539 - protein, 116 aa, Artificial Sequence
  Description of Artificial Sequence: Synthetic polypeptide
EVQLVESGAEVKRPGASVKVSCKASGYTFTSYGISWVRQAPGQGLEWMGRFIPNLNKGNSAHKFEGRVSFTADKFTNTAYMELRGLKSDDTAVYYCARGDYGSDQWGQGTLVTVSS

SEQ ID NO: 540 - protein, 8 aa, Artificial Sequence
  Description of Artificial Sequence: Synthetic peptide
SSNIGAGY

SEQ ID NO: 541 - protein, 3 aa, Artificial Sequence
  Description of Artificial Sequence: Synthetic peptide
GNS

SEQ ID NO: 542 - protein, 12 aa, Artificial Sequence
  Description of Artificial Sequence: Synthetic peptide
QSYDSSLSGSWV

SEQ ID NO: 543 - protein, 113 aa, Artificial Sequence
  Description of Artificial Sequence: Synthetic polypeptide
QSVLTQPPSVSGAPGQRVTISCTGSSSNIGAGYDVHWYQQLPGTAPKLLIYGNSNRPSGVPDRFSGSKSGTSASLAITGLQAEDEADYYCQSYDSSLSGSWVFGGGTKLTVLG

SEQ ID NO: 544 - protein, 8 aa, Artificial Sequence
  Description of Artificial Sequence: Synthetic peptide
GGTFSSYA

SEQ ID NO: 545 - protein, 8 aa, Artificial Sequence
  Description of Artificial Sequence: Synthetic peptide
IIPIFGTA

SEQ ID NO: 546 - protein, 10 aa, Artificial Sequence
  Description of Artificial Sequence: Synthetic peptide
ARYDSYVYDE

SEQ ID NO: 547 - protein, 117 aa, Artificial Sequence
  Description of Artificial Sequence: Synthetic polypeptide
EVQLVQSGAEVKKPGSSVKVSCKASGGTFSSYAISWVRQAPGQGLEWMGGIIPIFGTANYAQKFQGRVTITADESTSTAYMELSSLRSEDTAVYYCARYDSYVYDEWGQGTLVTVSS

SEQ ID NO: 548 - protein, 9 aa, Artificial Sequence
  Description of Artificial Sequence: Synthetic peptide
GSNIGAGYD

SEQ ID NO: 549 - protein, 3 aa, Artificial Sequence
  Description of Artificial Sequence: Synthetic peptide
GNS

SEQ ID NO: 550 - protein, 12 aa, Artificial Sequence
  Description of Artificial Sequence: Synthetic peptide
QSYDSSLSGWGI

SEQ ID NO: 551 - protein, 113 aa, Artificial Sequence
  Description of Artificial Sequence: Synthetic polypeptide
QSVVTQPPSLSGAPGQRVTISCNGSGSNIGAGYDVHWYQQLPGTAPKLLIYGNSNRPSGVPDRFSGSKSGTSASLAITGLQAEDEADYYCQSYDSSLSGWGIFGGGTKLTVLG

SEQ ID NO: 552 - protein, 8 aa, Artificial Sequence
  Description of Artificial Sequence: Synthetic peptide
GYTFTKYG

SEQ ID NO: 553 - protein, 8 aa, Artificial Sequence
  Description of Artificial Sequence: Synthetic peptide
ISADSGKT

SEQ ID NO: 554 - protein, 6 aa, Artificial Sequence
  Description of Artificial Sequence: Synthetic peptide
ARDDDS

SEQ ID NO: 555 - protein, 113 aa, Artificial Sequence
  Description of Artificial Sequence: Synthetic polypeptide
QVQLVQSGPEVKKPGASMKVSCKASGYTFTKYGISWVRQAPGQGLEWMGWISADSGKTSYAQNLQGRVSLTIDTSTATAYMELRSLRSDDTAVYYCARDDDSWGQGTLVTVSS

SEQ ID NO: 556 - protein, 8 aa, Artificial Sequence
  Description of Artificial Sequence: Synthetic peptide
SSNIGNNY

SEQ ID NO: 557 - protein, 3 aa, Artificial Sequence
  Description of Artificial Sequence: Synthetic peptide
DNN

SEQ ID NO: 558 - protein, 11 aa, Artificial Sequence
  Description of Artificial Sequence: Synthetic peptide
GTWDSSLSAEV

SEQ ID NO: 559 - protein, 111 aa, Artificial Sequence
  Description of Artificial Sequence: Synthetic polypeptide
QSVLTQPPSVSAAPGQKVTISCSGSSSNIGNNYVSWYQQLPGTAPKLLIYDNNKRPSGIPDRFSGSKSGTSATLGITGLQTGDEADYYCGTWDSSLSAEVFGTGTKVTVLG

SEQ ID NO: 560 - protein, 8 aa, Artificial Sequence
  Description of Artificial Sequence: Synthetic peptide
GYTLTDLP

SEQ ID NO: 561 - protein, 8 aa, Artificial Sequence
  Description of Artificial Sequence: Synthetic peptide
FDPEDGEI

SEQ ID NO: 562 - protein, 12 aa, Artificial Sequence
  Description of Artificial Sequence: Synthetic peptide
ARYVPYVSYSDS

SEQ ID NO: 563 - protein, 119 aa, Artificial Sequence
  Description of Artificial Sequence: Synthetic polypeptide
EVQLVQSGAEVKKPGASVKVSCKVSGYTLTDLPMHWVRQAPGKGLEWMGGFDPEDGEIIYAQKFQGRVTMTEDTFTDTAYVELSSLRSEDTAVYYCARYVPYVSYSDSWGQGTLVTVSS

SEQ ID NO: 564 - protein, 11 aa, Artificial Sequence
  Description of Artificial Sequence: Synthetic peptide
QSLLHSNGYNY

SEQ ID NO: 565 - protein, 3 aa, Artificial Sequence
  Description of Artificial Sequence: Synthetic peptide
LGS

SEQ ID NO: 566 - protein, 9 aa, Artificial Sequence
  Description of Artificial Sequence: Synthetic peptide
MQALQTPYT

SEQ ID NO: 567 - protein, 113 aa, Artificial Sequence
  Description of Artificial Sequence: Synthetic polypeptide
DVVMTQSPLSLPVTPGEPASISCRSSQSLLHSNGYNYLDWYLQKPGQSPQLLIYLGSNRASGVPDRFSGSGSGTDFTLKISRVEAEDVGVYYCMQALQTPYTFGQGTKLEIKR

SEQ ID NO: 568 - protein, 8 aa, Artificial Sequence
  Description of Artificial Sequence: Synthetic peptide
GGTFSSYA

SEQ ID NO: 569 - protein, 8 aa, Artificial Sequence
  Description of Artificial Sequence: Synthetic peptide
IIPIFGTA

SEQ ID NO: 570 - protein, 12 aa, Artificial Sequence
  Description of Artificial Sequence: Synthetic peptide
ARSYWSWTPYDP

SEQ ID NO: 571 - protein, 119 aa, Artificial Sequence
  Description of Artificial Sequence: Synthetic polypeptide
EVQLVQSGAEVKKPGASVKVSCKASGGTFSSYAISWVRQAPGQGLEWMGGIIPIFGTANYAQKFQGRVTITADKSTSTAYMELSSLRSEDTAVYYCARSYWSWTPYDPWGQGTLVTVSS

SEQ ID NO: 572 - protein, 6 aa, Artificial Sequence
  Description of Artificial Sequence: Synthetic peptide
NIGSKS

SEQ ID NO: 573 - protein, 3 aa, Artificial Sequence
  Description of Artificial Sequence: Synthetic peptide
YDS

SEQ ID NO: 574 - protein, 11 aa, Artificial Sequence
  Description of Artificial Sequence: Synthetic peptide
QVWDSSSDHYV

SEQ ID NO: 575 - protein, 109 aa, Artificial Sequence
  Description of Artificial Sequence: Synthetic polypeptide
LPVLTQPPSVSVAPGKTARITCGGNNIGSKSVHWYQQKPGQAPVLVIYYDSDRPSGIPERFSGSNSGNTATLTISRVEAGDEADYYCQVWDSSSDHYVFGTGTKVTVLG

SEQ ID NO: 576 - protein, 9 aa, Homo sapiens
VLDGLDVLL

SEQ ID NO: 577 - protein, 10 aa, Homo sapiens
SLYSFPEPEA

SEQ ID NO: 578 - protein, 10 aa, Homo sapiens
ALYVDSLFFL

SEQ ID NO: 579 - protein, 9 aa, Homo sapiens
SLLQHLIGL

SEQ ID NO: 580 - protein, 9 aa, Homo sapiens
NLTHVLYPV

SEQ ID NO: 581 - protein, 8 aa, Artificial Sequence
  Description of Artificial Sequence: Synthetic peptide
GGTFSSYA

SEQ ID NO: 582 - protein, 8 aa, Artificial Sequence
  Description of Artificial Sequence: Synthetic peptide
IIPILGIA

SEQ ID NO: 583 - protein, 10 aa, Artificial Sequence
  Description of Artificial Sequence: Synthetic peptide
ARHYGQWWDY

SEQ ID NO: 584 - protein, 117 aa, Artificial Sequence
  Description of Artificial Sequence: Synthetic polypeptide
QVQLVQSGAEVRKPGASVKVSCKASGGTFSSYAISWVRQAPGQGLEWMGRIIPILGIANYAQKFQGRVTITADKSTSTAYMELSSLRSEDTAVYYCARHYGQWWDYWGQGTLVTVSS

SEQ ID NO: 585 - protein, 8 aa, Artificial Sequence
  Description of Artificial Sequence: Synthetic peptide
SSNIGSNT

SEQ ID NO: 586 - protein, 3 aa, Artificial Sequence
  Description of Artificial Sequence: Synthetic peptide
SNN

SEQ ID NO: 587 - protein, 12 aa, Artificial Sequence
  Description of Artificial Sequence: Synthetic peptide
AAWDDSLNGSYV

SEQ ID NO: 588 - protein, 112 aa, Artificial Sequence
  Description of Artificial Sequence: Synthetic polypeptide
QAVLTQPPSASGTPGQRVTISCSGSSSNIGSNTVNWYQQLPGTAPKLLIYSNNQRPSGVPDRFSGSKSGTSASLAISGLQSEDEADYYCAAWDDSLNGSYVFGTGTKVTVLG

SEQ ID NO: 589 - protein, 8 aa, Artificial Sequence
  Description of Artificial Sequence: Synthetic peptide
GGTFSSHP

SEQ ID NO: 590 - protein, 8 aa, Artificial Sequence
  Description of Artificial Sequence: Synthetic peptide
IIPMLDIP

SEQ ID NO: 591 - protein, 9 aa, Artificial Sequence
  Description of Artificial Sequence: Synthetic peptide
ARGLYYYDY

SEQ ID NO: 592 - protein, 116 aa, Artificial Sequence
  Description of Artificial Sequence: Synthetic polypeptide
QVQLVQSGAEVKKPGSSVKVSCKASGGTFSSHPISWVRQAPGQGLEWMGRIIPMLDIPNNAQKFQGRVTITADKSTDTAYLELSSLTSEDTAVYYCARGLYYYDYWGQGTLVTVSS

SEQ ID NO: 593 - protein, 9 aa, Artificial Sequence
  Description of Artificial Sequence: Synthetic peptide
TSNIGAGFD

SEQ ID NO: 594 - protein, 3 aa, Artificial Sequence
  Description of Artificial Sequence: Synthetic peptide
GNT

SEQ ID NO: 595 - protein, 11 aa, Artificial Sequence
  Description of Artificial Sequence: Synthetic peptide
QSYDRSLSTIL

SEQ ID NO: 596 - protein, 112 aa, Artificial Sequence
  Description of Artificial Sequence: Synthetic polypeptide
QSVVTQPPAVSGALGQRVTISCTGTTSNIGAGFDVHWYQQRPGAAPKLLISGNTHRPSGVPDRISGSKSGTLASLAITGLQAEDEADYYCQSYDRSLSTILFGGGTKLTVLG

SEQ ID NO: 597 - protein, 8 aa, Artificial Sequence
  Description of Artificial Sequence: Synthetic peptide
GGTFSSYA

SEQ ID NO: 598 - protein, 8 aa, Artificial Sequence
  Description of Artificial Sequence: Synthetic peptide
IIPIFGIA

SEQ ID NO: 599 - protein, 9 aa, Artificial Sequence
  Description of Artificial Sequence: Synthetic peptide
ARSMWYMDS

SEQ ID NO: 600 - protein, 116 aa, Artificial Sequence
  Description of Artificial Sequence: Synthetic polypeptide
EVQLVESGAEVKKPGSSVKVSCKASGGTFSSYAISWVRQAPGQGLEWMGRIIPIFGIANYAQKFQGRVTITADKSTSTAYMELSSLRSEDTAVYYCARSMWYMDSWGQGTLVTVSS

SEQ ID NO: 601 - protein, 9 aa, Artificial Sequence
  Description of Artificial Sequence: Synthetic peptide
SSNIGAGFD

SEQ ID NO: 602 - protein, 3 aa, Artificial Sequence
  Description of Artificial Sequence: Synthetic peptide
GNS

SEQ ID NO: 603 - protein, 11 aa, Artificial Sequence
  Description of Artificial Sequence: Synthetic peptide
QSYDSSLSGYV

SEQ ID NO: 604 - protein, 112 aa, Artificial Sequence
  Description of Artificial Sequence: Synthetic polypeptide
QSVLTQPPSVSGAPGQRVTISCTGSSSNIGAGFDVHWYQQLPGTAPKLLIFGNSNRPSGVPDRFSGSKSGTSASLAITGLQAEDEADYYCQSYDSSLSGYVFGSGTKVTVLG

SEQ ID NO: 605 - protein, 8 aa, Artificial Sequence
  Description of Artificial Sequence: Synthetic peptide
GYTFSSYG

SEQ ID NO: 606 - protein, 8 aa, Artificial Sequence
  Description of Artificial Sequence: Synthetic peptide
ISPYNGNT

SEQ ID NO: 607 - protein, 11 aa, Artificial Sequence
  Description of Artificial Sequence: Synthetic peptide
ARYSGYYYVDY

SEQ ID NO: 608 - protein, 118 aa, Artificial Sequence
  Description of Artificial Sequence: Synthetic polypeptide
QVQLVQSGAEVKKPGASVKVSCKASGYTFSSYGISWVRQAPGQGLEWMGWISPYNGNTNYAQNLQGRVTMTTDTSTTTAYMELRSLTSDDTAVYYCARYSGYYYVDYWGQGTLVTVSS

SEQ ID NO: 609 - protein, 6 aa, Artificial Sequence
  Description of Artificial Sequence: Synthetic peptide
QSISSY

SEQ ID NO: 610 - protein, 3 aa, Artificial Sequence
  Description of Artificial Sequence: Synthetic peptide
AAS

SEQ ID NO: 611 - protein, 9 aa, Artificial Sequence
  Description of Artificial Sequence: Synthetic peptide
QQSYSTPRT

SEQ ID NO: 612 - protein, 108 aa, Artificial Sequence
  Description of Artificial Sequence: Synthetic polypeptide
DIQLTQSPSSLSASVGDRVTITCRASQSISSYLNWYQQKPGKAPKLLIYAASSLQSGVPSRFSGSGSGTDFTLTISSLQPEDFATYYCQQSYSTPRTFGQGTKVEIKR

SEQ ID NO: 613 - protein, 8 aa, Artificial Sequence
  Description of Artificial Sequence: Synthetic peptide
GGTFSSYA

SEQ ID NO: 614 - protein, 8 aa, Artificial Sequence
  Description of Artificial Sequence: Synthetic peptide
IIPILGIA

SEQ ID NO: 615 - protein, 12 aa, Artificial Sequence
  Description of Artificial Sequence: Synthetic peptide
ARQGYVWSEMDF

SEQ ID NO: 616 - protein, 119 aa, Artificial Sequence
  Description of Artificial Sequence: Synthetic polypeptide
EVQLVESGAEVKKPGSSVKVSCKASGGTFSSYAISWVRQAPGQGLEWMGRIIPILGIANYAQKFQGRVTITADKSTSTAYMELSSLRSEDTAVYYCARQGYVWSEMDFWGQGTLVTVSS

SEQ ID NO: 617 - protein, 6 aa, Artificial Sequence
  Description of Artificial Sequence: Synthetic peptide
NIGSKS

SEQ ID NO: 618 - protein, 3 aa, Artificial Sequence
  Description of Artificial Sequence: Synthetic peptide
YDS

SEQ ID NO: 619 - protein, 11 aa, Artificial Sequence
  Description of Artificial Sequence: Synthetic peptide
QVWDSITDHYV

SEQ ID NO: 620 - protein, 111 aa, Artificial Sequence
  Description of Artificial Sequence: Synthetic polypeptide
KLLPVLTQPPSVSVAPGKTARITCGGNNIGSKSVHWYQQKPGQAPVLVIYYDSDRPSGIPERFSGSNSGNTATLTISRVEAGDEADYYCQVWDSITDHYVFGTGTKVTVLG

SEQ ID NO: 621 - protein, 8 aa, Artificial Sequence
  Description of Artificial Sequence: Synthetic peptide
GYTFTSYY

SEQ ID NO: 622 - protein, 8 aa, Artificial Sequence
  Description of Artificial Sequence: Synthetic peptide
INPSGGST

SEQ ID NO: 623 - protein, 10 aa, Artificial Sequence
  Description of Artificial Sequence: Synthetic peptide
AAGSYYSLDI

SEQ ID NO: 624 - protein, 117 aa, Artificial Sequence
  Description of Artificial Sequence: Synthetic polypeptide
EVQLVESGAEVKKPGASVKVSCKASGYTFTSYYMHWVRQAPGQGLEWMGIINPSGGSTSYAQKFQGRVTMTRDTSTSTVYMELSSLRSEDTAVYYCAAGSYYSLDIWGQGTMVTVSS

SEQ ID NO: 625 - protein, 8 aa, Artificial Sequence
  Description of Artificial Sequence: Synthetic peptide
SGSIASNF

SEQ ID NO: 626 - protein, 3 aa, Artificial Sequence
  Description of Artificial Sequence: Synthetic peptide
DDN

SEQ ID NO: 627 - protein, 9 aa, Artificial Sequence
  Description of Artificial Sequence: Synthetic peptide
QSYDGSNVI

SEQ ID NO: 628 - protein, 113 aa, Artificial Sequence
  Description of Artificial Sequence: Synthetic polypeptide
KLLPVLTQPHSVSESPGKTVTISCTGSSGSIASNFVQWYQQRPGSAPTTVIYDDNQRPSGVPDRFSASIDRSSNSASLTISGLKTDDEADYYCQSYDGSNVIFGGGTKLTVLG

SEQ ID NO: 629 - protein, 8 aa, Artificial Sequence
  Description of Artificial Sequence: Synthetic peptide
GYTFSSYY

SEQ ID NO: 630 - protein, 8 aa, Artificial Sequence
  Description of Artificial Sequence: Synthetic peptide
INPTSGST

SEQ ID NO: 631 - protein, 10 aa, Artificial Sequence
  Description of Artificial Sequence: Synthetic peptide
ARSGGGYGDS

SEQ ID NO: 632 - protein, 117 aa, Artificial Sequence
  Description of Artificial Sequence: Synthetic polypeptide
EVQLVQSGAEVEKPGASVKVSCKASGYTFSSYYMDWVRQAPGQGLEWMGRINPTSGSTTYAQKFQGRVTMTRDTSTFTVYMDLSSLRSEDTAVYYCARSGGGYGDSWGQGTLVTVSS

SEQ ID NO: 633 - protein, 6 aa, Artificial Sequence
  Description of Artificial Sequence: Synthetic peptide
NFGSQS

SEQ ID NO: 634 - protein, 3 aa, Artificial Sequence
  Description of Artificial Sequence: Synthetic peptide
YDQ

SEQ ID NO: 635 - protein, 11 aa, Artificial Sequence
  Description of Artificial Sequence: Synthetic peptide
QVWDTYTDHVV

SEQ ID NO: 636 - protein, 109 aa, Artificial Sequence
  Description of Artificial Sequence: Synthetic polypeptide
QPVLTQPPSVSVAPGETASVSCGGNNFGSQSVHWYQQKSGQAPLLVIYYDQDRPSEIPARFSGSKSGNTATLTISRVEAGDEADYYCQVWDTYTDHVVFGGGTKLTVLG

SEQ ID NO: 637 - protein, 9 aa, Homo sapiens
RMFPNAPYL

SEQ ID NO: 638 - protein, 10 aa, Artificial Sequence
  Description of Artificial Sequence: Synthetic peptide
GGTFSSYAIS

SEQ ID NO: 639 - protein, 17 aa, Artificial Sequence
  Description of Artificial Sequence: Synthetic peptide
GIIPIFGTANYAQKFQG

SEQ ID NO: 640 - protein, 10 aa, Artificial Sequence
  Description of Artificial Sequence: Synthetic peptide
RIPPYYGMDV

SEQ ID NO: 641 - protein, 119 aa, Artificial Sequence
  Description of Artificial Sequence: Synthetic polypeptide
QVQLVQSGAEVKKPGSSVKVSCKASGGTFSSYAISWVRQAPGQGLEWMGGIIPIFGTANYAQKFQGRVTITADESTSTAYMELSSLRSEDTAVYYCARRIPPYYGMDVWGQGTTVTVSS

SEQ ID NO: 642 - protein, 13 aa, Artificial Sequence
  Description of Artificial Sequence: Synthetic peptide
SGSSSNIGSNYVY

SEQ ID NO: 643 - protein, 7 aa, Artificial Sequence
  Description of Artificial Sequence: Synthetic peptide
RSNQRPS

SEQ ID NO: 644 - protein, 11 aa, Artificial Sequence
  Description of Artificial Sequence: Synthetic peptide
AAWDDSLNGVV

SEQ ID NO: 645 - protein, 111 aa, Artificial Sequence
  Description of Artificial Sequence: Synthetic polypeptide
QTVVTQPPSASGTPGQRVTISCSGSSSNIGSNYVYWYQQLPGTAPKLLIYRSNQRPSGVPDRFSGSKSGTSASLAISGPRSVDEADYYCAAWDDSLNGVVFGGGTKLTVLG

SEQ ID NO: 646 - protein, 250 aa, Artificial Sequence
  Description of Artificial Sequence: Synthetic polypeptide
QTVVTQPPSASGTPGQRVTISCSGSSSNIGSNYVYWYQQLPGTAPKLLIYRSNQRPSGVPDRFSGSKSGTSASLAISGPRSVDEADYYCAAWDDSLNGVVFGGGTKLTVLGSRGGGGSGGGGSGGGSLEMAQVQLVQSGAEVKKPGSSVKVSCKASGGTFSSYAISWVRQAPGQGLEWMGGIIPIFGTANYAQKFQGRVTITADESTSTAYMELSSLRSEDTAVYYCARRIPPYYGMDVWGQGTTVTVSS

SEQ ID NO: 647 - protein, 12 aa, Artificial Sequence
  Description of Artificial Sequence: Synthetic peptide
GDSVSSNSAAWN

SEQ ID NO: 648 - protein, 18 aa, Artificial Sequence
  Description of Artificial Sequence: Synthetic peptide
RTYYGSKWYNDYAVSVKS

SEQ ID NO: 649 - protein, 9 aa, Artificial Sequence
  Description of Artificial Sequence: Synthetic peptide
GRLGDAFDI

SEQ ID NO: 650 - protein, 121 aa, Artificial Sequence
  Description of Artificial Sequence: Synthetic polypeptide
QVQLQQSGPGLVKPSQTLSLTCAISGDSVSSNSAAWNWIRQSPSRGLEWLGRTYYGSKWYNDYAVSVKSRITINPDTSKNQFSLQLNSVTPEDTAVYYCARGRLGDAFDIWGQGTMVTVSS

SEQ ID NO: 651 - protein, 11 aa, Artificial Sequence
  Description of Artificial Sequence: Synthetic peptide
RASQSISSYLN

SEQ ID NO: 652 - protein, 7 aa, Artificial Sequence
  Description of Artificial Sequence: Synthetic peptide
AASSLQS

SEQ ID NO: 653 - protein, 9 aa, Artificial Sequence
  Description of Artificial Sequence: Synthetic peptide
QQSYSTPLT

SEQ ID NO: 654 - protein, 108 aa, Artificial Sequence
  Description of Artificial Sequence: Synthetic polypeptide
DIQMTQSPSSLSASVGDRVTITCRASQSISSYLNWYQQKPGKAPKLLIYAASSLQSGVPSRFSGSGSGTDFTLTISSLQPEDFATYYCQQSYSTPLTFGGGTKVDIKR

SEQ ID NO: 655 - protein, 250 aa, Artificial Sequence
  Description of Artificial Sequence: Synthetic polypeptide
DIQMTQSPSSLSASVGDRVTITCRASQSISSYLNWYQQKPGKAPKLLIYAASSLQSGVPSRFSGSGSGTDFTLTISSLQPEDFATYYCQQSYSTPLTFGGGTKVDIKRSRGGGGSGGGGSGGGGSLEMAQVQLQQSGPGLVKPSQTLSLTCAISGDSVSSNSAAWNWIRQSPSRGLEWLGRTYYGSKWYNDYAVSVKSRITINPDTSKNQFSLQLNSVTPEDTAVYYCARGRLGDAFDIWGQGTMVTVSS

SEQ ID NO: 656 - protein, 10 aa, Artificial Sequence
  Description of Artificial Sequence: Synthetic peptide
GYSFTNFWIS

SEQ ID NO: 657 - protein, 17 aa, Artificial Sequence
  Description of Artificial Sequence: Synthetic peptide
RVDPGYSYSTYSPSFQG

SEQ ID NO: 658 - protein, 12 aa, Artificial Sequence
  Description of Artificial Sequence: Synthetic peptide
VQYSGYYDWFDP

SEQ ID NO: 659 - protein, 121 aa, Artificial Sequence
  Description of Artificial Sequence: Synthetic polypeptide
QMQLVQSGAEVKEPGESLRISCKGSGYSFTNFWISWVRQMPGKGLEWMGRVDPGYSYSTYSPSFQGHVTISADKSTSTAYLQWNSLKASDTAMYYCARVQYSGYYDWFDPWGQGTLVTVSS

SEQ ID NO: 660 - protein, 13 aa, Artificial Sequence
  Description of Artificial Sequence: Synthetic peptide
SGSSSNIGSNTVN

SEQ ID NO: 661 - protein, 7 aa, Artificial Sequence
  Description of Artificial Sequence: Synthetic peptide
SNNQRPS

SEQ ID NO: 662 - protein, 11 aa, Artificial Sequence
  Description of Artificial Sequence: Synthetic peptide
AAWDDSLNGWV

SEQ ID NO: 663 - protein, 111 aa, Artificial Sequence
  Description of Artificial Sequence: Synthetic polypeptide
QAVVTQPPSASGTPGQRVTISCSGSSSNIGSNTVNWYQQVPGTAPKLLIYSNNQRPSGVPDRFSGSKSGTSASLAISGLQSEDEADYYCAAWDDSLNGWVFGGGTKLTVLG

SEQ ID NO: 664 - protein, 253 aa, Artificial Sequence
  Description of Artificial Sequence: Synthetic polypeptide
QAVVTQPPSASGTPGQRVTISCSGSSSNIGSNTVNWYQQVPGTAPKLLIYSNNQRPSGVPDRFSGSKSGTSASLAISGLQSEDEADYYCAAWDDSLNGWVFGGGTKLTVLGSRGGGGSGGGGSGGGGSLEMAQMQLVQSGAEVKEPGESLRISCKGSGYSFTNFWISWVRQMPGKGLEWMGRVDPGYSYSTYSPSFQGHVTISADKSTSTAYLQWNSLKASDTAMYYCARVQYSGYYDWFDPWGQGTLVTVSS

SEQ ID NO: 665 - protein, 10 aa, Artificial Sequence
  Description of Artificial Sequence: Synthetic peptide
GYNFSNKWIG

SEQ ID NO: 666 - protein, 17 aa, Artificial Sequence
  Description of Artificial Sequence: Synthetic peptide
IIYPGYSDITYSPSFQG

SEQ ID NO: 667 - protein, 9 aa, Artificial Sequence
  Description of Artificial Sequence: Synthetic peptide
HTALAGFDY

SEQ ID NO: 668 - protein, 118 aa, Artificial Sequence
  Description of Artificial Sequence: Synthetic polypeptide
QVQLVQSGAEVKKPGESLKISCKGSGYNFSNKWIGWVRQLPGRGLEWIAIIYPGYSDITYSPSFQGRVTISADTSINTAYLHWHSLKASDTAMYYCVRHTALAGFDYWGLGTLVTVSS

SEQ ID NO: 669 - protein, 11 aa, Artificial Sequence
  Description of Artificial Sequence: Synthetic peptide
RASQNINKWLA

SEQ ID NO: 670 - protein, 7 aa, Artificial Sequence
  Description of Artificial Sequence: Synthetic peptide
KASSLES

SEQ ID NO: 671 - protein, 8 aa, Artificial Sequence
  Description of Artificial Sequence: Synthetic peptide
QQYNSYAT

SEQ ID NO: 672 - protein, 107 aa, Artificial Sequence
  Description of Artificial Sequence: Synthetic polypeptide
DIQMTQSPSTLSASVGDRVTITCRASQNINKWLAWYQQRPGKAPQLLIYKASSLESGVPSRFSGSGSGTEYTLTISSLQPDDFATYYCQQYNSYATFGQGTKVEIKR

SEQ ID NO: 673 - protein, 246 aa, Artificial Sequence
  Description of Artificial Sequence: Synthetic polypeptide
DIQMTQSPSTLSASVGDRVTITCRASQNINKWLAWYQQRPGKAPQLLIYKASSLESGVPSRFSGSGSGTEYTLTISSLQPDDFATYYCQQYNSYATFGQGTKVEIKRSRGGGGSGGGGSGGGGSLEMAQVQLVQSGAEVKKPGESLKISCKGSGYNFSNKWIGWVRQLPGRGLEWIAIIYPGYSDITYSPSFQGRVTISADTSINTAYLHWHSLKASDTAMYYCVRHTALAGFDYWGLGTLVTVSS

SEQ ID NO: 674 - protein, 10 aa, Artificial Sequence
  Description of Artificial Sequence: Synthetic peptide
GFTFDDYGMS

SEQ ID NO: 675 - protein, 17 aa, Artificial Sequence
  Description of Artificial Sequence: Synthetic peptide
GINWNGGSTGYADSVRG

SEQ ID NO: 676 - protein, 12 aa, Artificial Sequence
  Description of Artificial Sequence: Synthetic peptide
ERGYGYHDPHDY

SEQ ID NO: 677 - protein, 121 aa, Artificial Sequence
  Description of Artificial Sequence: Synthetic polypeptide
EVQLVQSGGGVVRPGGSLRLSCAASGFTFDDYGMSWVRQAPGKGLEWVSGINWNGGSTGYADSVRGRFTISRDNAKNSLYLQMNSLRAEDTALYYCARERGYGYHDPHDYWGQGTLVTVSS

SEQ ID NO: 678 - protein, 11 aa, Artificial Sequence
  Description of Artificial Sequence: Synthetic peptide
GRNNIGSKSVH

SEQ ID NO: 679 - protein, 7 aa, Artificial Sequence
  Description of Artificial Sequence: Synthetic peptide
DDSDRPS

SEQ ID NO: 680 - protein, 11 aa, Artificial Sequence
  Description of Artificial Sequence: Synthetic peptide
QVWDSSSDHVV

SEQ ID NO: 681 - protein, 109 aa, Artificial Sequence
  Description of Artificial Sequence: Synthetic polypeptide
QSVVTQPPSVSVAPGKTARITCGRNNIGSKSVHWYQQKPGQAPVLVVYDDSDRPSGIPERFSGSNSGNTATLTISRVEAGDEADYYCQVWDSSSDHVVFGGGTKLTVLG

SEQ ID NO: 682 - protein, 249 aa, Artificial Sequence
  Description of Artificial Sequence: Synthetic polypeptide
QSVVTQPPSVSVAPGKTARITCGRNNIGSKSVHWYQQKPGQAPVLVVYDDSDRPSGIPERFSGSNSGNTATLTISRVEAGDEADYYCQVWDSSSDHVVFGGGTKLTVLGSRGGGGSGGGGSGGSLEMAEVQLVQSGGGVVRPGGSLRLSCAASGFTFDDYGMSWVRQAPGKGLEWVSGINWNGGSTGYADSVRGRFTISRDNAKNSLYLQMNSLRAEDTALYYCARERGYGYHDPHDYWGQGTLVTVSS

SEQ ID NO: 683 - protein, 10 aa, Artificial Sequence
  Description of Artificial Sequence: Synthetic peptide
GFSVSGTYMG

SEQ ID NO: 684 - protein, 16 aa, Artificial Sequence
  Description of Artificial Sequence: Synthetic peptide
LLYSGGGTYHPASLQG

SEQ ID NO: 685 - protein, 10 aa, Artificial Sequence
  Description of Artificial Sequence: Synthetic peptide
GGAGGGHFDS

SEQ ID NO: 686 - protein, 118 aa, Artificial Sequence
  Description of Artificial Sequence: Synthetic polypeptide
EVQLVETGGGLLQPGGSLRLSCAASGFSVSGTYMGWVRQAPGKGLEWVALLYSGGGTYHPASLQGRFIVSRDSSKNMVYLQMNSLKAEDTAVYYCAKGGAGGGHFDSWGQGTLVTVSS

SEQ ID NO: 687 - protein, 14 aa, Artificial Sequence
  Description of Artificial Sequence: Synthetic peptide
TGSSSNIGAGYDVH

SEQ ID NO: 688 - protein, 7 aa, Artificial Sequence
  Description of Artificial Sequence: Synthetic peptide
GNSNRPS

SEQ ID NO: 689 - protein, 11 aa, Artificial Sequence
  Description of Artificial Sequence: Synthetic peptide
AAWDDSLNGYV

SEQ ID NO: 690 - protein, 112 aa, Artificial Sequence
  Description of Artificial Sequence: Synthetic polypeptide
QSVLTQPPSVSGAPGQRVTISCTGSSSNIGAGYDVHWYQQLPGTAPKLLIYGNSNRPSGVPDRFSGSKSGTSASLAISGLQSEDEADYYCAAWDDSLNGYVFGTGTKLTVLG

SEQ ID NO: 691 - protein, 251 aa, Artificial Sequence
  Description of Artificial Sequence: Synthetic polypeptide
QSVLTQPPSVSGAPGQRVTISCTGSSSNIGAGYDVHWYQQLPGTAPKLLIYGNSNRPSGVPDRFSGSKSGTSASLAISGLQSEDEADYYCAAWDDSLNGYVFGTGTKLTVLGSRGGGGSGGGGSGGGGSLEMAEVQLVETGGGLLQPGGSLRLSCAASGFSVSGTYMGWVRQAPGKGLEWVALLYSGGGTYHPASLQGRFIVSRDSSKNMVYLQMNSLKAEDTAVYYCAKGGAGGGHFDSWGQGTLVTVSS

SEQ ID NO: 692 - protein, 10 aa, Homo sapiens
RKSAPSTGGV

SEQ ID NO: 693 - protein, 10 aa, Homo sapiens
RKSAPATGGV

SEQ ID NO: 694 - protein, 10 aa, Homo sapiens
RMSAPSTGGV

SEQ ID NO: 695 - protein, 10 aa, Homo sapiens
RMSAPATGGV

SEQ ID NO: 696 - protein, 10 aa, Homo sapiens
AMSAPSTGGV

SEQ ID NO: 697 - protein, 10 aa, Homo sapiens
RASAPSTGGV

SEQ ID NO: 698 - protein, 10 aa, Homo sapiens
RMAAPSTGGV

SEQ ID NO: 699 - protein, 10 aa, Homo sapiens
RMSAASTGGV

SEQ ID NO: 700 - protein, 10 aa, Homo sapiens
RMSAPSAGGV

SEQ ID NO: 701 - protein, 10 aa, Homo sapiens
RMSAPSTAGV

SEQ ID NO: 702 - protein, 10 aa, Homo sapiens
RMSAPSTGAV

SEQ ID NO: 703 - protein, 10 aa, Homo sapiens
RMSAPSTGGA

SEQ ID NO: 704 - protein, 10 aa, Homo sapiens
AMSAPATGGV

SEQ ID NO: 705 - protein, 10 aa, Homo sapiens
RASAPATGGV

SEQ ID NO: 706 - protein, 10 aa, Homo sapiens
RMAAPATGGV

SEQ ID NO: 707 - protein, 10 aa, Homo sapiens
RMSAAATGGV

SEQ ID NO: 708 - protein, 10 aa, Homo sapiens
RMSAPAAGGV

SEQ ID NO: 709 - protein, 10 aa, Homo sapiens
RMSAPATAGV

SEQ ID NO: 710 - protein, 10 aa, Homo sapiens
RMSAPATGAV

SEQ ID NO: 711 - protein, 10 aa, Homo sapiens
RMSAPATGGA

SEQ ID NO: 712 - protein, 8 aa, Artificial Sequence
  Description of Artificial Sequence: Synthetic peptide
GYSFTSYW

SEQ ID NO: 713 - protein, 8 aa, Artificial Sequence
  Description of Artificial Sequence: Synthetic peptide
IYPGDSDT

SEQ ID NO: 714 - protein, 6 aa, Artificial Sequence
  Description of Artificial Sequence: Synthetic peptide
ARGYDG

SEQ ID NO: 715 - protein, 113 aa, Artificial Sequence
  Description of Artificial Sequence: Synthetic polypeptide
EVQLVQSGAEVKKPGESLKISCKGSGYSFTSYWIGWVRQMPGKGLEWMGIIYPGDSDTRYSPSFQGQVTISADKSISTAYLQWSSLKASDTAMYYCARGYDGWGQGTLVTVSS

SEQ ID NO: 716 - protein, 11 aa, Artificial Sequence
  Description of Artificial Sequence: Synthetic peptide
QSLVYSNGNTY

SEQ ID NO: 717 - protein, 3 aa, Artificial Sequence
  Description of Artificial Sequence: Synthetic peptide
EVS

SEQ ID NO: 718 - protein, 9 aa, Artificial Sequence
  Description of Artificial Sequence: Synthetic peptide
MQGTHWPPT

SEQ ID NO: 719 - protein, 113 aa, Artificial Sequence
  Description of Artificial Sequence: Synthetic polypeptide
DVVMTQSPLSLPVTLGQPASISCRSSQSLVYSNGNTYLNWFHQRPGQSPRRLIYEVSNRDSGVPDRFSGSGSGTDFTLKISRVEAEDVGVYYCMQGTHWPPTFGGGTKLEIKR

SEQ ID NO: 720 - protein, 8 aa, Artificial Sequence
  Description of Artificial Sequence: Synthetic peptide
GYSFTSYW

SEQ ID NO: 721 - protein, 8 aa, Artificial Sequence
  Description of Artificial Sequence: Synthetic peptide
IYPGDSDT

SEQ ID NO: 722 - protein, 6 aa, Artificial Sequence
  Description of Artificial Sequence: Synthetic peptide
ARGFDN

SEQ ID NO: 723 - protein, 113 aa, Artificial Sequence
  Description of Artificial Sequence: Synthetic polypeptide
EVQLVQSGAEVKKPGESLKISCKGSGYSFTSYWIGWVRQMPGKGLEWMGIIYPGDSDTRYSPSFQGQVTISADKSISTAYLQWSSLKASDTAMYYCARGFDNWGQGTLVTVSS

SEQ ID NO: 724 - protein, 11 aa, Artificial Sequence
  Description of Artificial Sequence: Synthetic peptide
QSLVYSNGNTY

SEQ ID NO: 725 - protein, 3 aa, Artificial Sequence
  Description of Artificial Sequence: Synthetic peptide
KVS

SEQ ID NO: 726 - protein, 9 aa, Artificial Sequence
  Description of Artificial Sequence: Synthetic peptide
MQGTYWPYT

SEQ ID NO: 727 - protein, 113 aa, Artificial Sequence
  Description of Artificial Sequence: Synthetic polypeptide
EIVLTQSPLSLPVTLGQPASISCRSSQSLVYSNGNTYLSWFHQRPGQSPRRLIYKVSKRDSGVPDRFSGSGSGTDFTLKISRVEAEDVGVFYCMQGTYWPYTFGQGTKLEIKR

SEQ ID NO: 728 - protein, 8 aa, Artificial Sequence
  Description of Artificial Sequence: Synthetic peptide
GYSFTSYW

SEQ ID NO: 729 - protein, 8 aa, Artificial Sequence
  Description of Artificial Sequence: Synthetic peptide
IYPGDSDT

SEQ ID NO: 730 - protein, 6 aa, Artificial Sequence
  Description of Artificial Sequence: Synthetic peptide
ARGYDV

SEQ ID NO: 731 - protein, 113 aa, Artificial Sequence
  Description of Artificial Sequence: Synthetic polypeptide
EVQLVQSGAEVKKPGESLKISCKGSGYSFTSYWIGWVRQMPGKGLEWMGIIYPGDSDTRYSPSFQGQVTISADKSISTAYLQWSSLKASDTAMYYCARGYDVWGQGTLVTVSS

SEQ ID NO: 732 - protein, 11 aa, Artificial Sequence
  Description of Artificial Sequence: Synthetic peptide
QSLIYSNGNTY

SEQ ID NO: 733 - protein, 3 aa, Artificial Sequence
  Description of Artificial Sequence: Synthetic peptide
KVS

SEQ ID NO: 734 - protein, 9 aa, Artificial Sequence
  Description of Artificial Sequence: Synthetic peptide
MQGTHWPPT

SEQ ID NO: 735 - protein, 113 aa, Artificial Sequence
  Description of Artificial Sequence: Synthetic polypeptide
DVVMTQSPLSLPVTLGQPASISCRSSQSLIYSNGNTYLTWFHQRPGQPPRRLIHKVSNRDSGVPDRFSGSGSGSDFTLKISRVEAEDVGIYYCMQGTHWPPTFGGGTKLEIKR

SEQ ID NO: 736 - protein, 8 aa, Artificial Sequence
  Description of Artificial Sequence: Synthetic peptide
GYSFTSYW

SEQ ID NO: 737 - protein, 8 aa, Artificial Sequence
  Description of Artificial Sequence: Synthetic peptide
IYPGDSDT

SEQ ID NO: 738 - protein, 6 aa, Artificial Sequence
  Description of Artificial Sequence: Synthetic peptide
ARGYDS

SEQ ID NO: 739 - protein, 113 aa, Artificial Sequence
  Description of Artificial Sequence: Synthetic polypeptide
EVQLVQSGAEVKKPGESLKISCKGSGYSFTSYWIGWVRQMPGKGLEWMGIIYPGDSDTRYSPSFQGQVTISADKSISTAYLQWSSLKASDTAMYYCARGYDSWGQGTLVTVSS

SEQ ID NO: 740 - protein, 11 aa, Artificial Sequence
  Description of Artificial Sequence: Synthetic peptide
QSLIYSNGNTY

SEQ ID NO: 741 - protein, 3 aa, Artificial Sequence
  Description of Artificial Sequence: Synthetic peptide
KVS

SEQ ID NO: 742 - protein, 9 aa, Artificial Sequence
  Description of Artificial Sequence: Synthetic peptide
MQGTHWPPT

SEQ ID NO: 743 - protein, 113 aa, Artificial Sequence; identical to SEQ ID NO: 735
  Description of Artificial Sequence: Synthetic polypeptide

SEQ ID NO: 744 - protein, 8 aa, Artificial Sequence
  Description of Artificial Sequence: Synthetic peptide
GLTFDRYA

SEQ ID NO: 745 - protein, 8 aa, Artificial Sequence
  Description of Artificial Sequence: Synthetic peptide
ITGDGYYT

SEQ ID NO: 746 - protein, 13 aa, Artificial Sequence
  Description of Artificial Sequence: Synthetic peptide
ARLSGIGRSSYDG

SEQ ID NO: 747 - protein, 120 aa, Artificial Sequence
  Description of Artificial Sequence: Synthetic polypeptide
EVQLVESGGGLVQPGGSLRLSCAASGLTFDRYAMSWVRQAAGKGLERFSAITGDGYYTYYADSVKGRFTISRDNSKNTLYLQMNSLGAEDTAVYYCARLSGIGRSSYDGWGQGTLVTVSS

SEQ ID NO: 748 - protein, 9 aa, Artificial Sequence
  Description of Artificial Sequence: Synthetic peptide
SGINVGTYR

SEQ ID NO: 749 - protein, 7 aa, Artificial Sequence
  Description of Artificial Sequence: Synthetic peptide
YKSDSDK

SEQ ID NO: 750 - protein, 7 aa, Artificial Sequence
  Description of Artificial Sequence: Synthetic peptide
MIWHSSA

SEQ ID NO: 751 - protein, 116 aa, Artificial Sequence
  Description of Artificial Sequence: Synthetic polypeptide
QAVLTQPSSLSASPGASASLTCTLRSGINVGTYRIYWYQQKPGSPPQYLLRYKSDSDKQQGSGVPSRFSGSKDASANAGILLISGLQSEDEADYYCMIWHSSAWVFGGGTKLTVLG

SEQ ID NO: 752 - protein, 8 aa, Artificial Sequence
  Description of Artificial Sequence: Synthetic peptide
GYTFTSYT

SEQ ID NO: 753 - protein, 8 aa, Artificial Sequence
  Description of Artificial Sequence: Synthetic peptide
ISPYNGNT

SEQ ID NO: 754 - protein, 12 aa, Artificial Sequence
  Description of Artificial Sequence: Synthetic peptide
ARSWEHGFPYDE

SEQ ID NO: 755 - protein, 119 aa, Artificial Sequence
  Description of Artificial Sequence: Synthetic polypeptide
QVQLVESGAEVKKPGASVKVSCKASGYTFTSYTITWVRQAPGQGLEWMGWISPYNGNTNYAQNLQGRVTMTTDTSTTTAYMELRSLTSDDTAVYYCARSWEHGFPYDEWGQGTLVTVSS

SEQ ID NO: 756 - protein, 9 aa, Artificial Sequence
  Description of Artificial Sequence: Synthetic peptide
SSNLGAGYD

SEQ ID NO: 757 - protein, 8 aa, Artificial Sequence
  Description of Artificial Sequence: Synthetic peptide
ISPYNGNT

SEQ ID NO: 758 - protein, 11 aa, Artificial Sequence
  Description of Artificial Sequence: Synthetic peptide
QSYDSSLSASV

SEQ ID NO: 759 - protein, 112 aa, Artificial Sequence
  Description of Artificial Sequence: Synthetic polypeptide
QSVLTQPPSVSGAPGQRVTISCTGSSSNLGAGYDVHWYQQLPGTAPKVLVYFNNNRPSGVPDRFSGSKSGTSASLAITGLQAEDEADYYCQSYDSSLSASVFGTGTKVTVLG

SEQ ID NO: 760 - protein, 8 aa, Artificial Sequence
  Description of Artificial Sequence: Synthetic peptide
AGTFNRYS

SEQ ID NO: 761 - protein, 8 aa, Artificial Sequence
  Description of Artificial Sequence: Synthetic peptide
IIPIIGVA

SEQ ID NO: 762 - protein, 11 aa, Artificial Sequence
  Description of Artificial Sequence: Synthetic peptide
ARQEYSYAMDY

SEQ ID NO: 763 - protein, 118 aa, Artificial Sequence
  Description of Artificial Sequence: Synthetic polypeptide
EVQLVQSGAEVRKPGSSVKVSCKASAGTFNRYSLSWVRQAPGQGLEWVGRIIPIIGVADYAQKFQGRVTITADKSATTAYMELHSLRSEDTAVYYCARQEYSYAMDYWGQGTLVTVSS

SEQ ID NO: 764 - protein, 9 aa, Artificial Sequence
  Description of Artificial Sequence: Synthetic peptide
SSNIGAGYD

SEQ ID NO: 765 - protein, 3 aa, Artificial Sequence
  Description of Artificial Sequence: Synthetic peptide
GNN

SEQ ID NO: 766 - protein, 10 aa, Artificial Sequence
  Description of Artificial Sequence: Synthetic peptide
QSYDTSLTPV

SEQ ID NO: 767 - protein, 111 aa, Artificial Sequence
  Description of Artificial Sequence: Synthetic polypeptide
QSVLTQPPSVSGAPGQRVTIFCTGSSSNIGAGYDVHWYQQLPGTAPKLLIYGNNNRPSGVPDRFSGSKSGTSASLAITGLQAEDEADYYCQSYDTSLTPVFGGGTKLTVLG

SEQ ID NO: 768 - protein, 8 aa, Artificial Sequence
  Description of Artificial Sequence: Synthetic peptide
GGTFSSYA

SEQ ID NO: 769 - protein, 8 aa, Artificial Sequence
  Description of Artificial Sequence: Synthetic peptide
IIPIFGTA

SEQ ID NO: 770 - protein, 13 aa, Artificial Sequence
  Description of Artificial Sequence: Synthetic peptide
ARSYWTFEYSIDS

SEQ ID NO: 771 - protein, 120 aa, Artificial Sequence
  Description of Artificial Sequence: Synthetic polypeptide
QVQLVQSGAEVKKPGSSVKVSCKASGGTFSSYAISWVRQAPGQGLEWMGGIIPIFGTANYAQKFQGRVTITADESTSTAYMELSSLRSEDTAVYYCARSYWTFEYSIDSWGQGTLVTVSS

SEQ ID NO: 772 - protein, 9 aa, Artificial Sequence
  Description of Artificial Sequence: Synthetic peptide
SLNLGAGYD

SEQ ID NO: 773 - protein, 3 aa, Artificial Sequence
  Description of Artificial Sequence: Synthetic peptide
ANT

SEQ ID NO: 774 - protein, 11 aa, Artificial Sequence
  Description of Artificial Sequence: Synthetic peptide
QSYDNSLSGYV

SEQ ID NO: 775 - protein, 112 aa, Artificial Sequence
  Description of Artificial Sequence: Synthetic polypeptide
QSVLTQPPSVSGAPGQRVTISCTGSSLNLGAGYDVHWYQQFPGTAPKLLIFANTNRPSGVPDRFSASKSGTSASLAITGLQAEDEADYFCQSYDNSLSGYVFGTGTKVTVLG

SEQ ID NO: 776 - protein, 8 aa, Artificial Sequence
  Description of Artificial Sequence: Synthetic peptide
GYTFTSYG

SEQ ID NO: 777 - protein, 8 aa, Artificial Sequence
  Description of Artificial Sequence: Synthetic peptide
ISAYNGNT

SEQ ID NO: 778 - protein, 12 aa, Artificial Sequence
  Description of Artificial Sequence: Synthetic peptide
ARYYESGYPFDW

SEQ ID NO: 779 - protein, 119 aa, Artificial Sequence
  Description of Artificial Sequence: Synthetic polypeptide
EVQLVQSGAEVKKPGASVKVSCKASGYTFTSYGISWVRQAPGQGLEWMGWISAYNGNTNYAQKLQGRVTMTTDTSTSTAYMELRSLRSDDTAVYYCARYYESGYPFDWWGQGTLVTVSS

SEQ ID NO: 780 - protein, 8 aa, Artificial Sequence
  Description of Artificial Sequence: Synthetic peptide
TFNIGSNT

SEQ ID NO: 781 - protein, 3 aa, Artificial Sequence
  Description of Artificial Sequence: Synthetic peptide
SNN

SEQ ID NO: 782 - protein, 12 aa, Artificial Sequence
  Description of Artificial Sequence: Synthetic peptide
AAWDDSLSGHVV

SEQ ID NO: 783 - protein, 112 aa, Artificial Sequence
  Description of Artificial Sequence: Synthetic polypeptide
SYVLTQPPSASGTPGQRVTISCSGSTFNIGSNTVNWYQQLPATAPKLLIYSNNQRPSGVPDRFSGSKSGTSASLAISGLQSEDAAAYYCAAWDDSLSGHVVFGGGTKLTVLG

SEQ ID NO: 784 - protein, 8 aa, Artificial Sequence
  Description of Artificial Sequence: Synthetic peptide
GYTFTGYY

SEQ ID NO: 785 - protein, 8 aa, Artificial Sequence
  Description of Artificial Sequence: Synthetic peptide
FDPEDGET

SEQ ID NO: 786 - protein, 14 aa, Artificial Sequence
  Description of Artificial Sequence: Synthetic peptide
ARSSWWSPVTYYDI

SEQ ID NO: 787 - protein, 121 aa, Artificial Sequence
  Description of Artificial Sequence: Synthetic polypeptide
EVQLVQSGAEVKKPGASVKVSCKASGYTFTGYYMHWVRQAPGKGLEWMGGFDPEDGETIYAQKFQGRVTMTEDTSTDTAYMELSSLRSEDTAVYYCARSSWWSPVTYYDIWGQGTLVTVSS

SEQ ID NO: 788 - protein, 6 aa, Artificial Sequence
  Description of Artificial Sequence: Synthetic peptide
SLRSYY

SEQ ID NO: 789 - protein, 3 aa, Artificial Sequence
  Description of Artificial Sequence: Synthetic peptide
AKS

SEQ ID NO: 790 - protein, 9 aa, Artificial Sequence
  Description of Artificial Sequence: Synthetic peptide
NSRDSSGNR

SEQ ID NO: 791 - protein, 109 aa, Artificial Sequence
  Description of Artificial Sequence: Synthetic polypeptide
SSELTQDPAVSVALGQTVRITCQGDSLRSYYANWYQQKPGQAPVLVIYAKSNRPSGIADRFSGSSSGNTASLTITGAQAEDEADYYCNSRDSSGNRWVFGGGTKVTVLG

SEQ ID NO: 792 - protein, 8 aa, Artificial Sequence
  Description of Artificial Sequence: Synthetic peptide
GYTVTSYG

SEQ ID NO: 793 - protein, 8 aa, Artificial Sequence
  Description of Artificial Sequence: Synthetic peptide
ISAYNGDT

SEQ ID NO: 794 - protein, 16 aa, Artificial Sequence
  Description of Artificial Sequence: Synthetic peptide
ARSSLPFGVVPNAFDI

SEQ ID NO: 795 - protein, 123 aa, Artificial Sequence
  Description of Artificial Sequence: Synthetic polypeptide
QMQLVQSGAEVKKPGASMKVSCKASGYTVTSYGLSWVRQAPGQGLEWVGWISAYNGDTIYAQKLQGRVTMTTDTSTSTAYMELRSLRSDDTAMYYCARSSLPFGVVPNAFDIWGQGTMVTVSS

SEQ ID NO: 796 - protein, 8 aa, Artificial Sequence
  Description of Artificial Sequence: Synthetic peptide
SSNIGSNT

SEQ ID NO: 797 - protein, 3 aa, Artificial Sequence
  Description of Artificial Sequence: Synthetic peptide
SNN

SEQ ID NO: 798 - protein, 11 aa, Artificial Sequence
  Description of Artificial Sequence: Synthetic peptide
AAWDDSLNGYV

SEQ ID NO: 799 - protein, 111 aa, Artificial Sequence
  Description of Artificial Sequence: Synthetic polypeptide
SYVLTQPPSASGTPGQRVTISCSGSSSNIGSNTVNWYQQLPGTAPKLLIYSNNQRPSGVPDRFSGSKSGTSASLAISGLQSEDEADYYCAAWDDSLNGYVFGTGTKVTVLG

SEQ ID NO: 800 - protein, 8 aa, Artificial Sequence
  Description of Artificial Sequence: Synthetic peptide
GYTFTDYY

SEQ ID NO: 801 - protein, 8 aa, Artificial Sequence
  Description of Artificial Sequence: Synthetic peptide
INPHSGGT

SEQ ID NO: 802 - protein, 13 aa, Artificial Sequence
  Description of Artificial Sequence: Synthetic peptide
AREDYSGSGSSDA

SEQ ID NO: 803 - protein, 120 aa, Artificial Sequence
  Description of Artificial Sequence: Synthetic polypeptide
QMQLVQSGAEVKTTGASVRVSCKASGYTFTDYYLHWVRQAPGQGLEWMGWINPHSGGTNYAQKFQGRVTMTRDTSISTAYMELSSLRSDDTAVYYCAREDYSGSGSSDAWGQGTLVTVSS

SEQ ID NO: 804 - protein, 6 aa, Artificial Sequence
  Description of Artificial Sequence: Synthetic peptide
NIGSKS

SEQ ID NO: 805 - protein, 3 aa, Artificial Sequence
  Description of Artificial Sequence: Synthetic peptide
YDN

SEQ ID NO: 806 - protein, 11 aa, Artificial Sequence
  Description of Artificial Sequence: Synthetic peptide
QVWNSSSDHYV

SEQ ID NO: 807 - protein, 109 aa, Artificial Sequence
  Description of Artificial Sequence: Synthetic polypeptide
SYELTQPPSVSVAPGKTARITCGGNNIGSKSVNWYQQKPGQAPVLVIYYDNDRPSGIPERFSGSNSGNTATLTISRVEAGDEADYYCQVWNSSSDHYVFGTGTKVTVLG

SEQ ID NO: 808 - protein, 7 aa, Artificial Sequence
  Description of Artificial Sequence: Synthetic peptide
NNNYYWT

SEQ ID NO: 809 - protein, 16 aa, Artificial Sequence
  Description of Artificial Sequence: Synthetic peptide
YIYYSGSTFYNPSLKS

SEQ ID NO: 810 - protein, 9 aa, Artificial Sequence
  Description of Artificial Sequence: Synthetic peptide
EDTMTGLDV

SEQ ID NO: 811 - protein, 119 aa, Artificial Sequence
  Description of Artificial Sequence: Synthetic polypeptide
QVQLQESGPGLVKPSQTLSLTCTVSGGSINNNNYYWTWIRQHPGKGLEWIGYIYYSGSTFYNPSLKSRVTISVDTSKTQFSLKLSSVTAADTAVYYCAREDTMTGLDVWGQGTTVTVSS

SEQ ID NO: 812 - protein, 11 aa, Artificial Sequence
  Description of Artificial Sequence: Synthetic peptide
RASQSINNYLN

SEQ ID NO: 813 - protein, 7 aa, Artificial Sequence
  Description of Artificial Sequence: Synthetic peptide
AASSLQS

SEQ ID NO: 814 - protein, 8 aa, Artificial Sequence
  Description of Artificial Sequence: Synthetic peptide
QQTYSNPT

SEQ ID NO: 815 - protein, 106 aa, Artificial Sequence
  Description of Artificial Sequence: Synthetic polypeptide
DIQMTQSPSSLSASVGDRVTITCRASQSINNYLNWYQQKPGKAPTLLIYAASSLQSGVPSRFSGSRSGTDFTLTISSLQPEDFAAYFCQQTYSNPTFGQGTKVEVK

SEQ ID NO: 816 - protein, 15 aa, Homo sapiens
KTITATGVLFVRLGP

SEQ ID NO: 817 - protein, 8 aa, Artificial Sequence
  Description of Artificial Sequence: Synthetic peptide
GYRFSKYW

SEQ ID NO: 818 - protein, 8 aa, Artificial Sequence
  Description of Artificial Sequence: Synthetic peptide
IYPGDSDT

SEQ ID NO: 819 - protein, 11 aa, Artificial Sequence
  Description of Artificial Sequence: Synthetic peptide
ARSFSSFIYDY

SEQ ID NO: 820 - protein, 118 aa, Artificial Sequence
  Description of Artificial Sequence: Synthetic polypeptide
EVQLVQSGAEVKKPGESLKISCQGSGYRFSKYWIGWVRQMPGKGLEWMGIIYPGDSDTRYSPSFQGQVTISADKSISTAYLQWSSLKASDTAMYYCARSFSSFIYDYWGQGTLVTVSS

SEQ ID NO: 821 - protein, 8 aa, Artificial Sequence
  Description of Artificial Sequence: Synthetic peptide
GYSFSNYW

SEQ ID NO: 822 - protein, 8 aa, Artificial Sequence
  Description of Artificial Sequence: Synthetic peptide
IYPDDSDT

SEQ ID NO: 823 - protein, 9 aa, Artificial Sequence
  Description of Artificial Sequence: Synthetic peptide
VRPRGAFDI

SEQ ID NO: 824 - protein, 116 aa, Artificial Sequence
  Description of Artificial Sequence: Synthetic polypeptide
QVQLVESGAEVKKPGESLKISCKASGYSFSNYWIGWVRQMPGKGLEWMGIIYPDDSDTRYSPSFQGQVTISADKSISTAYLQWYSLKVADTAKYYCVRPRGAFDIWGQGTTVTVSS

SEQ ID NO: 825 - protein, 10 aa, Artificial Sequence
  Description of Artificial Sequence: Synthetic peptide
GGSISSGGYY

SEQ ID NO: 826 - protein, 7 aa, Artificial Sequence
  Description of Artificial Sequence: Synthetic peptide
IYYSGST

SEQ ID NO: 827 - protein, 13 aa, Artificial Sequence
  Description of Artificial Sequence: Synthetic peptide
ARGGLYWTYSQDV

SEQ ID NO: 828 - protein, 121 aa, Artificial Sequence
  Description of Artificial Sequence: Synthetic polypeptide
EVQLVESGPGLVKPSQTLSLTCTVSGGSISSGGYYWSWIRQHPGKGLEWIGYIYYSGSTYYNPSLKSRVTISVDTSKNQFSLKLSSVTAADTAMYYCARGGLYWTYSQDVWGQGTLVTVSS

SEQ ID NO: 829 - protein, 10 aa, Artificial Sequence
  Description of Artificial Sequence: Synthetic peptide
GFSLSTSGMS

SEQ ID NO: 830 - protein, 7 aa, Artificial Sequence
  Description of Artificial Sequence: Synthetic peptide
IDWDDDK

SEQ ID NO: 831 - protein, 13 aa, Artificial Sequence
  Description of Artificial Sequence: Synthetic peptide
ARGFYLAYGSYDS

SEQ ID NO: 832 - protein, 121 aa, Artificial Sequence
  Description of Artificial Sequence: Synthetic polypeptide
QITLKESGPELVKPTQTLTLTCTFSGFSLSTSGMSVSWIRQPPGKALEWLARIDWDDDKYYSTSLKTRLTISKDTSKNQVVLTMTNTDPVDTATYYCARGFYLAYGSYDSWGQGTLVTVSS

SEQ ID NO: 833 - protein, 8 aa, Artificial Sequence
  Description of Artificial Sequence: Synthetic peptide
GYTFTNYY

SEQ ID NO: 834 - protein, 8 aa, Artificial Sequence
  Description of Artificial Sequence: Synthetic peptide
INPTSGRT

SEQ ID NO: 835 - protein, 13 aa, Artificial Sequence
  Description of Artificial Sequence: Synthetic peptide
ARSGYYWGVNGDQ

SEQ ID NO: 836 - protein, 120 aa, Artificial Sequence
  Description of Artificial Sequence: Synthetic polypeptide
EVQLVQSGAEVKKPGASVKVSCKASGYTFTNYYIHWVRQAPGQGLEWMGIINPTSGRTRYAQRFQGRVTMTRDTSTNTVYMDLSSLRSEDTAMYYCARSGYYWGVNGDQWGQGTLVTVSS

SEQ ID NO: 837 - protein, 6 aa, Artificial Sequence
  Description of Artificial Sequence: Synthetic peptide
QSVSSN

SEQ ID NO: 838 - protein, 3 aa, Artificial Sequence
  Description of Artificial Sequence: Synthetic peptide
GAS

SEQ ID NO: 839 - protein, 9 aa, Artificial Sequence
  Description of Artificial Sequence: Synthetic peptide
QQYGRSPLT

SEQ ID NO: 840 - protein, 108 aa, Artificial Sequence
  Description of Artificial Sequence: Synthetic polypeptide
ETTLTQSPGTLSVSPGERATLSCRASQSVSSNLAWYQQKRGQAPRLLIYGASTRATGIPVRFSGSGSGTEFTLTISRLEPEDFAVYYCQQYGRSPLTFGGGTKVDIKR

SEQ ID NO: 841 - protein, 9 aa, Artificial Sequence
  Description of Artificial Sequence: Synthetic peptide
SSNIGAGHA

SEQ ID NO: 842 - protein, 3 aa, Artificial Sequence
  Description of Artificial Sequence: Synthetic peptide
DNA

SEQ ID NO: 843 - protein, 11 aa, Artificial Sequence
  Description of Artificial Sequence: Synthetic peptide
GTWDDSPSAYV

SEQ ID NO: 844 - protein, 112 aa, Artificial Sequence
  Description of Artificial Sequence: Synthetic polypeptide
QSVLTQPPSVSGAPGQRVTISCTGSSSNIGAGHAVHWYQQLPGTAPKLLIYDNANRPSGVPDRFSGSQSGTSASLAITGLQTGDEADYYCGTWDDSPSAYVFGTGTKVTVLG

SEQ ID NO: 845 - protein, 8 aa, Artificial Sequence
  Description of Artificial Sequence: Synthetic peptide
SSNIGSDY

SEQ ID NO: 846 - protein, 3 aa, Artificial Sequence
  Description of Artificial Sequence: Synthetic peptide
RND

SEQ ID NO: 847 - protein, 11 aa, Artificial Sequence
  Description of Artificial Sequence: Synthetic peptide
VAWDDSLSGYV

SEQ ID NO: 848 - protein, 111 aa, Artificial Sequence
  Description of Artificial Sequence: Synthetic polypeptide
QPVLTQPPSASGTPGQRVTISCSGSSSNIGSDYVSWYQQLPGTAPKLLIYRNDQRPSGVPDRFSGSKSGTSASLAISGLRSEDEADYYCVAWDDSLSGYVFGSGTKVTVLG

SEQ ID NO: 849 - protein, 9 aa, Artificial Sequence
  Description of Artificial Sequence: Synthetic peptide
SGDVGGYNY

SEQ ID NO: 850 - protein, 3 aa, Artificial Sequence
  Description of Artificial Sequence: Synthetic peptide
DVN

SEQ ID NO: 851 - protein, 9 aa, Artificial Sequence
  Description of Artificial Sequence: Synthetic peptide
SSYTSTSTV

SEQ ID NO: 852 - protein, 110 aa, Artificial Sequence
  Description of Artificial Sequence: Synthetic polypeptide
QSALTQPASVSGSPGQSITISCTGTSGDVGGYNYVSWYQHHPGKAPKLIIYDVNKRPSGFSDRFSGSKSGNTASLTISGLQAEDEADYYCSSYTSTSTVFGGGTKLTVLG

SEQ ID NO: 853 - protein, 6 aa, Artificial Sequence
  Description of Artificial Sequence: Synthetic peptide
NIGSKN

SEQ ID NO: 854 - protein, 3 aa, Artificial Sequence
  Description of Artificial Sequence: Synthetic peptide
RDS

SEQ ID NO: 855 - protein, 9 aa, Artificial Sequence
  Description of Artificial Sequence: Synthetic peptide
QVWDSSIVV

SEQ ID NO: 856 - protein, 107 aa, Artificial Sequence
  Description of Artificial Sequence: Synthetic polypeptide
SYELTQPLSVSVALGQTARITCGGNNIGSKNVHWYQQKPGQAPVLVIYRDSNRPSGIPERFSGSNSGNTATLTISRAQAGDEADYYCQVWDSSIVVFGGGTKLTVLG

SEQ ID NO: 857 - protein, 8 aa, Artificial Sequence
  Description of Artificial Sequence: Synthetic peptide
GFTFSSYA

SEQ ID NO: 858 - protein, 8 aa, Artificial Sequence
  Description of Artificial Sequence: Synthetic peptide
ISGSGYST

SEQ ID NO: 859 - protein, 17 aa, Artificial Sequence
  Description of Artificial Sequence: Synthetic peptide
AKGFQYGSGSYYTHFDY

SEQ ID NO: 860 - protein, 124 aa, Artificial Sequence
  Description of Artificial Sequence: Synthetic polypeptide
EVQLLESGGGLVQPGGSLRLSCAASGFTFSSYAMTWVRQAPGKGLEWVSAISGSGYSTYYADSEKGRFTISRDNSKNTLYLQMNSLRAEDTAVYYCAKGFQYGSGSYYTHFDYWGQGTLVTVSS

SEQ ID NO: 861 - protein, 6 aa, Artificial Sequence
  Description of Artificial Sequence: Synthetic peptide
QGISSW

SEQ ID NO: 862 - protein, 3 aa, Artificial Sequence
  Description of Artificial Sequence: Synthetic peptide
AAS

SEQ ID NO: 863 - protein, 9 aa, Artificial Sequence
  Description of Artificial Sequence: Synthetic peptide
QQYNSYPYT

SEQ ID NO: 864 - protein, 107 aa, Artificial Sequence
  Description of Artificial Sequence: Synthetic polypeptide
DIQMTQSPSSLSASVGDRVTITCRASQGISSWLAWYQQKPEKAPKSLIYAASSLQSGVPSRFSGSGSGTDFTLTISSLQPEDFATYYCQQYNSYPYTFGQGTKLEIK

SEQ ID NO: 865 - protein, 291 aa, Artificial Sequence
  Description of Artificial Sequence: Synthetic polypeptide
MKYLLPTAAAGLLLLAAQPAMAQVQLVQSGGGLVQPGRSLRLSCAASGFTFDDYAMHWVRQAPGKGLEWVSGISWNSGSIGYADSVKGRFTISRDNAKNSLYLQMNSLRPEDTAVYYCARDLGAKQWLEGFDYWGQGTLVTVSSGGGGSGGGGSGGGGSNFMLTQDPAVSVALGQTVRITCQGDSLRSYYASWYQQKPGQAPVLVIYGKNNRPSGIPDRFSGSTSGNSASLTITGAQAEDEADYYCNSRDSSGNHWVFGGGTKVTVLGAAAEQKLISEEDLNGAAHHHHHH

SEQ ID NO: 866 - protein, 8 aa, Artificial Sequence
  Description of Artificial Sequence: Synthetic peptide
GYAFTNYW

SEQ ID NO: 867 - protein, 8 aa, Artificial Sequence
  Description of Artificial Sequence: Synthetic peptide
IFPGSGNI

SEQ ID NO: 868 - protein, 12 aa, Artificial Sequence
  Description of Artificial Sequence: Synthetic peptide
ARLRNWDEPMDY

SEQ ID NO: 869 - protein, 120 aa, Artificial Sequence
  Description of Artificial Sequence: Synthetic polypeptide
EVQLLEQSGAELVRPGTSVKISCKASGYAFTNYWLGWVKQRPGHGLEWIGDIFPGSGNIHYNEKFKGKATLTADKSSSTAYMQLSSLTFEDSAVYFCARLRNWDEPMDYWGQGTTVTVSS

SEQ ID NO: 870 - protein, 12 aa, Artificial Sequence
  Description of Artificial Sequence: Synthetic peptide
QSLLNSGNQKNY

SEQ ID NO: 871 - protein, 3 aa, Artificial Sequence
  Description of Artificial Sequence: Synthetic peptide
WAS

SEQ ID NO: 872 - protein, 9 aa, Artificial Sequence
  Description of Artificial Sequence: Synthetic peptide
QNDYSYPLT

SEQ ID NO: 873 - protein, 113 aa, Artificial Sequence
  Description of Artificial Sequence: Synthetic polypeptide
ELVMTQSPSSLTVTAGEKVTMSCKSSQSLLNSGNQKNYLTWYQQKPGQPPKLLIYWASTRESGVPDRFTGSGSGTDFTLTISSVQAEDLAVYYCQNDYSYPLTFGAGTKLEIK

SEQ ID NO: 874 - protein, 8 aa, Artificial Sequence
  Description of Artificial Sequence: Synthetic peptide
GYIFTSYD

SEQ ID NO: 875 - protein, 8 aa, Artificial Sequence
  Description of Artificial Sequence: Synthetic peptide
IFPGEGST

SEQ ID NO: 876 - protein, 12 aa, Artificial Sequence
  Description of Artificial Sequence: Synthetic peptide
ARGDYYRRYFDL

SEQ ID NO: 877 - protein, 119 aa, Artificial Sequence
  Description of Artificial Sequence: Synthetic polypeptide
QVKLQQSGTEVVKPGASVKLSCKASGYIFTSYDIDWVRQTPEQGLEWIGWIFPGEGSTEYNEKFKGRATLSVDKSSSTAYMELTRLTSEDSAVYFCARGDYYRRYFDLWGQGTTVTVSS

SEQ ID NO: 878 - protein, 7 aa, Artificial Sequence
  Description of Artificial Sequence: Synthetic peptide
ASSSIRY

SEQ ID NO: 879 - protein, 3 aa, Artificial Sequence
  Description of Artificial Sequence: Synthetic peptide
DTS

SEQ ID NO: 880 - protein, 9 aa, Artificial Sequence
  Description of Artificial Sequence: Synthetic peptide
QEWSGYPYT

SEQ ID NO: 881 - protein, 110 aa, Artificial Sequence
  Description of Artificial Sequence: Synthetic polypeptide
DIELTQSPAIMSASPGERVTMTCSASSSIRYIYWYQQKPGSSPRLLIYDTSNVAPGVPFRFSGSGSGTSYSLTINRMEAEDAATYYCQEWSGYPYTFGGGTKLELKRAAA

SEQ ID NO: 882 - protein, 8 aa, Artificial Sequence
  Description of Artificial Sequence: Synthetic peptide
GGSFSGYY

SEQ ID NO: 883 - protein, 7 aa, Artificial Sequence
  Description of Artificial Sequence: Synthetic peptide
INHSGST

SEQ ID NO: 884 - protein, 9 aa, Artificial Sequence
  Description of Artificial Sequence: Synthetic peptide
ARQSYITDS

SEQ ID NO: 885 - protein, 115 aa, Artificial Sequence
  Description of Artificial Sequence: Synthetic polypeptide
QVQLQQWGAGLLKPSETLSLTCAVYGGSFSGYYWSWIRQPPGKGLEWIGEINHSGSTNYNPSLKSRVTISVDTSKNQFSLKLSSVTAADTAVYYCARQSYITDSWGQGTLVTVSS

SEQ ID NO: 886 - protein, 8 aa, Artificial Sequence
  Description of Artificial Sequence: Synthetic peptide
GGSFSGYY

SEQ ID NO: 887 - protein, 7 aa, Artificial Sequence
  Description of Artificial Sequence: Synthetic peptide
INHSGST

SEQ ID NO: 888 - protein, 8 aa, Artificial Sequence
  Description of Artificial Sequence: Synthetic peptide
RGSIASAY

SEQ ID NO: 889 - protein, 120 aa, Artificial Sequence
  Description of Artificial Sequence: Synthetic polypeptide
QVQLQQWGAGLLKPSETLSLTCAVYGGSFSGYYWSWIRQPPGKGLEWIGEINHSGSTNYNPSLKSRIIMSVDTSKRQFSLKLRSATAADTAVYYCARWSPFSYKQMYDYWGQGTLVTVSS

SEQ ID NO: 890 - protein, 6 aa, Artificial Sequence
  Description of Artificial Sequence: Synthetic peptide
QDVSKW

SEQ ID NO: 891 - protein, 3 aa, Artificial Sequence
  Description of Artificial Sequence: Synthetic peptide
AAS

SEQ ID NO: 892 - protein, 9 aa, Artificial Sequence
  Description of Artificial Sequence: Synthetic peptide
QQANSFPWT

SEQ ID NO: 893 - protein, 108 aa, Artificial Sequence
  Description of Artificial Sequence: Synthetic polypeptide
DIQLTQSPSAVSASVGDRVTITCRASQDVSKWLAWYQQKPGKAPRLLISAASGLQSWVPSRFSGSGSGTEFTLSISSLQPEDFATYYCQQANSFPWTFGQGTKVEIKR

SEQ ID NO: 894 - protein, 8 aa, Artificial Sequence
  Description of Artificial Sequence: Synthetic peptide
RGSIASAY

SEQ ID NO: 895 - protein, 3 aa, Artificial Sequence
  Description of Artificial Sequence: Synthetic peptide
EDY

SEQ ID NO: 896 - protein, 10 aa, Artificial Sequence
  Description of Artificial Sequence: Synthetic peptide
QSYDDNDHVI

SEQ ID NO: 897 - protein, 112 aa, Artificial Sequence
  Description of Artificial Sequence: Synthetic polypeptide
NFMLTQPHSVSESPGKTVTISCTRSRGSIASAYVQWYQQRPGSAPITVIYEDYERPSEIPDRFSGSIDSSSNSASLTISGLKTEDEADYYCQSYDDNDHVIFGGGTKVTVLG

SEQ ID NO: 898 - protein, 8 aa, Artificial Sequence
  Description of Artificial Sequence: Synthetic peptide
GFTFSSYA

SEQ ID NO: 899 - protein, 8 aa, Artificial Sequence
  Description of Artificial Sequence: Synthetic peptide
ISSAGGYI

SEQ ID NO: 900 - protein, 16 aa, Artificial Sequence
  Description of Artificial Sequence: Synthetic peptide
ARQGFGNYGDYYAMDY

SEQ ID NO: 901 - protein, 123 aa, Artificial Sequence
  Description of Artificial Sequence: Synthetic polypeptide
EVKLQESGGGFVKPGGSLRVSCAASGFTFSSYAMSWVRLAPEMRLEWVATISSAGGYIFYSDSVQGRFTISRDNAKNSLHLQMGSLRSGDTAMYYCARQGFGNYGDYYAMDYWGQGTTVTVSS

SEQ ID NO: 902 - protein, 123 aa, Artificial Sequence
  Description of Artificial Sequence: Synthetic polypeptide
EVQLVESGGGLVKPGGSLRVSCAASGFTFSSYAMSWVRLAPGKGLEWVATISSAGGYIFYSDSVQGRFTISRDNAKNSLYLQMNSLRAEDTAMYYCARQGFGNYGDYYAMDYWGQGTLVTVSS

SEQ ID NO: 903 - protein, 10 aa, Artificial Sequence
  Description of Artificial Sequence: Synthetic peptide
GFSLSTVGMG

SEQ ID NO: 904 - protein, 8 aa, Artificial Sequence
  Description of Artificial Sequence: Synthetic peptide
IWWDDEDK

SEQ ID NO: 905 - protein, 14 aa, Artificial Sequence
  Description of Artificial Sequence: Synthetic peptide
TRIGTAQATDALDY

SEQ ID NO: 906 - protein, 123 aa, Artificial Sequence
  Description of Artificial Sequence: Synthetic polypeptide
QVTLKESGPGILQPTQTLTLTCTFSGFSLSTVGMGVGWSRQPSGKGLEWLAHIWWDDEDKYYNPALKSRLTITKDTSKNQVFLKITNVDTADTATYYCTRIGTAQATDALDYWGQGTLVTVSS

SEQ ID NO: 907 - protein, 123 aa, Artificial Sequence
  Description of Artificial Sequence: Synthetic polypeptide
QVTLKESGPTLVKPTQTLTLTCTFSGFSLSTVGMGVGWSRQPSGKGLEWLAHIWWDDEDKYYNPALKSRLTITKDTSKNQVVLTITNVDPVDTATYYCTRIGTAQATDALDYWGQGTLVTVSS

SEQ ID NO: 908 - protein, 12 aa, Artificial Sequence
  Description of Artificial Sequence: Synthetic peptide
QSLLNSRTRKNQ

SEQ ID NO: 909 - protein, 3 aa, Artificial Sequence
  Description of Artificial Sequence: Synthetic peptide
WAS

SEQ ID NO: 910 - protein, 8 aa, Artificial Sequence
  Description of Artificial Sequence: Synthetic peptide
QQSYNLLT

SEQ ID NO: 911 - protein, 113 aa, Artificial Sequence
  Description of Artificial Sequence: Synthetic polypeptide
DIELTQSPSSLAVSAGERVTMNCKSSQSLLNSRTRKNQLAWYQQKPGQSPELLIYWASTRQSGVPDRFSGSGSGTDFTLTISSVQAEDVAVYYCQQSYNLLTFGPGTKLEIKR

SEQ ID NO: 912 - protein, 113 aa, Artificial Sequence
  Description of Artificial Sequence: Synthetic polypeptide
DIVLTQSPDSLAVSLGERVTMNCKSSQSLLNSRTRKNQLAWYQQKPGQSPELLIYWASTRQSGVPDRFSGSGSGTDFTLTISSVQAEDVAVYYCQQSYNLLTFGQGTKLEIKR

SEQ ID NO: 913 - protein, 11 aa, Artificial Sequence
  Description of Artificial Sequence: Synthetic peptide
KSLLHSNGNTY

SEQ ID NO: 914 - protein, 3 aa, Artificial Sequence
  Description of Artificial Sequence: Synthetic peptide
YMS

SEQ ID NO: 915 - protein, 9 aa, Artificial Sequence
  Description of Artificial Sequence: Synthetic peptide
MQSLEYPLT

SEQ ID NO: 916 - protein, 113 aa, Artificial Sequence
  Description of Artificial Sequence: Synthetic polypeptide
DIVMTQSAPSVPVTPGESVSISCRSSKSLLHSNGNTYLYWFLQKPGQSPQRLIYYMSNLASGVPDRFSGRGSGTDFTLKISRVEAEDVGVYYCMQSLEYPLTFGGGTKLEIKR

SEQ ID NO: 917 - protein, 113 aa, Artificial Sequence
  Description of Artificial Sequence: Synthetic polypeptide
DIVMTQSALSLPVTPGEPVSISCRSSKSLLHSNGNTYLYWFLQKPGQSPQRLIYYMSNLASGVPDRFSGSGSGTDFTLKISRVEAEDVGVYYCMQSLEYPLTFGGGTKLEIKR

SEQ ID NO: 918 - protein, 5 aa, Artificial Sequence
  Description of Artificial Sequence: Synthetic peptide
GYGLS

SEQ ID NO: 919 - protein, 13 aa, Artificial Sequence
  Description of Artificial Sequence: Synthetic peptide
MISSGGSYTYYAD

SEQ ID NO: 920 - protein, 10 aa, Artificial Sequence
  Description of Artificial Sequence: Synthetic peptide
HGDDPAWFAY

SEQ ID NO: 921 - protein, 119 aa, Artificial Sequence
  Description of Artificial Sequence: Synthetic polypeptide
EVQLVESGGGVVQPGRSLRLSCSASGFTFSGYGLSWVRQAPGKGLEWVAMISSGGSYTYYADSVKGRFAISRDNAKNTLFLQMDSLRPEDTGVYFCARHGDDPAWFAYWGQGTPVTVSS

SEQ ID NO: 922 - protein, 449 aa, Artificial Sequence
  Description of Artificial Sequence: Synthetic polypeptide
EVQLVESGGGVVQPGRSLRLSCSASGFTFSGYGLSWVRQAPGKGLEWVAMISSGGSYTYYADSVKGRFAISRDNAKNTLFLQMDSLRPEDTGVYFCARHGDDPAWFAYWGQGTPVTVSSASTKGPSVFPLAPSSKSTSGGTAALGCLVKDYFPEPVTVSWNSGALTSGVHTFPAVLQSSGLYSLSSVVTVPSSSLGTQTYICNVNHKPSNTKVDKKVEPKSCDKTHTCPPCPAPELLGGPSVFLFPPKPKDTLMISRTPEVTCVVVDVSHEDPEVKFNWYVDGVEVHNAKTKPREEQYNSTYRVVSVLTVLHQDWLNGKEYKCKVSNKALPAPIEKTISKAKGQPREPQVYTLPPSRDELTKNQVSLTCLVKGFYPSDIAVEWESNGQPENNYKTTPPVLDSDGSFFLYSKLTVDKSRWQQGNVFSCSVMHEALHNHYTQKSLSLSPGK

SEQ ID NO: 923 - protein, 12 aa, Artificial Sequence
  Description of Artificial Sequence: Synthetic peptide
SVSSSISSNNLH

SEQ ID NO: 924 - protein, 7 aa, Artificial Sequence
  Description of Artificial Sequence: Synthetic peptide
GTSNLAS

SEQ ID NO: 925 - protein, 11 aa, Artificial Sequence
  Description of Artificial Sequence: Synthetic peptide
QQWSSYPYMYT

SEQ ID NO: 926 - protein, 110 aa, Artificial Sequence
  Description of Artificial Sequence: Synthetic polypeptide
DIQLTQSPSSLSASVGDRVTITCSVSSSISSNNLHWYQQKPGKAPKPWIYGTSNLASGVPSRFSGSGSGTDYTFTISSLQPEDIATYYCQQWSSYPYMYTFGQGTKVEIK

SEQ ID NO: 927 - protein, 217 aa, Artificial Sequence
  Description of Artificial Sequence: Synthetic polypeptide
DIQLTQSPSSLSASVGDRVTITCSVSSSISSNNLHWYQQKPGKAPKPWIYGTSNLASGVPSRFSGSGSGTDYTFTISSLQPEDIATYYCQQWSSYPYMYTFGQGTKVEIKRTVAAPSVFIFPPSDEQLKSGTASVVCLLNNFYPREAKVQWKVDNALQSGNSQESVTEQDSKDSTYSLSSTLTLSKADYEKHKVYACEVTHQGLSSPVTKSFNRGEC

SEQ ID NO: 928 - protein, 5 aa, Artificial Sequence
  Description of Artificial Sequence: Synthetic peptide
NYGVH

SEQ ID NO: 929 - protein, 16 aa, Artificial Sequence
  Description of Artificial Sequence: Synthetic peptide
GVIWSGGNTDYNTPFT

SEQ ID NO: 930 - protein, 13 aa, Artificial Sequence
  Description of Artificial Sequence: Synthetic peptide
RALTYYDYEFAYW

SEQ ID NO: 931 - protein, 119 aa, Artificial Sequence
  Description of Artificial Sequence: Synthetic polypeptide
EVQLVESGGGLVQPGGSLRLSCAVSGFSLTNYGVHWVRQATGKGLEWLGVIWSGGNTDYNTPFTSRLTISKENAKNSVYLQMNSLRAGDTAVYYCARALTYYDYEFAYWGQGTMVTVSS

SEQ ID NO: 932 - protein, 11 aa, Artificial Sequence
  Description of Artificial Sequence: Synthetic peptide
RASQSIGTNIH

SEQ ID NO: 933 - protein, 7 aa, Artificial Sequence
  Description of Artificial Sequence: Synthetic peptide
YASESIS

SEQ ID NO: 934 - protein, 7 aa, Artificial Sequence
  Description of Artificial Sequence: Synthetic peptide
QQNNNWP

SEQ ID NO: 935 - protein, 107 aa, Artificial Sequence
  Description of Artificial Sequence: Synthetic polypeptide
EIVLTQSPATLSLSPGERATLSCRASQSIGTNIHWYQQRPGQAPRLLIYYASESISGIPARFSGSGSGTDFTLTISSLEPEDFAVYYCQQNNNWPTTFGGGTKVEIK

SEQ ID NO: 936 - protein, 248 aa, Artificial Sequence; identical to SEQ ID NO: 54
  Description of Artificial Sequence: Synthetic polypeptide

SEQ ID NO: 937 - protein, 8 aa, Artificial Sequence
  Description of Artificial Sequence: Synthetic peptide
GFTFRKFG

SEQ ID NO: 938 - protein, 8 aa, Artificial Sequence
  Description of Artificial Sequence: Synthetic peptide
ISTGGYNT

SEQ ID NO: 939 - protein, 13 aa, Artificial Sequence
  Description of Artificial Sequence: Synthetic peptide
TRGYSSTSYAMDY

SEQ ID NO: 940 - protein, 118 aa, Artificial Sequence
  Description of Artificial Sequence: Synthetic polypeptide
QVKLQQSGGGLVKPGASLKLSCVTSGFTFRKFGMSWVRQTSDKRLEWVASISTGGYNTYYSDNVKGRFTISRENAKNTLYLQMSSLKSEDTALYYCTRGYSSTSYAMDYWGQGTTVTV

SEQ ID NO: 941 - protein, 6 aa, Artificial Sequence
  Description of Artificial Sequence: Synthetic peptide
TDIDDD

SEQ ID NO: 942 - protein, 3 aa, Artificial Sequence
  Description of Artificial Sequence: Synthetic peptide
EGN

SEQ ID NO: 943 - protein, 9 aa, Artificial Sequence
  Description of Artificial Sequence: Synthetic peptide
LQSFNVPLT

SEQ ID NO: 944 - protein, 107 aa, Artificial Sequence
  Description of Artificial Sequence: Synthetic polypeptide
DIELTQSPASLSVATGEKVTIRCMTSTDIDDDMNWYQQKPGEPPKFLISEGNTLRPGVPSRFSSSGTGTDFVFTIENTLSEDVGDYYCLQSFNVPLTFGDGTKLEIK

SEQ ID NO: 945 - protein, 8 aa, Artificial Sequence
  Description of Artificial Sequence: Synthetic peptide
GFTFDDYA

SEQ ID NO: 946 - protein, 8 aa, Artificial Sequence
  Description of Artificial Sequence: Synthetic peptide
ISWNSGSI

SEQ ID NO: 947 - protein, 15 aa, Artificial Sequence
  Description of Artificial Sequence: Synthetic peptide
ARDLGAKQWLEGFDY

SEQ ID NO: 948 - protein, 142 aa, Artificial Sequence
  Description of Artificial Sequence: Synthetic polypeptide
MKYLLPTAAAGLLLLAAQPAMAQVQLVQSGGGLVQPGRSLRLSCAASGFTFDDYAMHWVRQAPGKGLEWVSGISWNSGSIGYADSVKGRFTISRDNAKNSLYLQMNSLRPEDTAVYYCARDLGAKQWLEGFDYWGQGTLVTV

SEQ ID NO: 949 - protein, 6 aa, Artificial Sequence
  Description of Artificial Sequence: Synthetic peptide
SLRSYY

SEQ ID NO: 950 - protein, 3 aa, Artificial Sequence
  Description of Artificial Sequence: Synthetic peptide
GKN

SEQ ID NO: 951 - protein, 11 aa, Artificial Sequence
  Description of Artificial Sequence: Synthetic peptide
NSRDSSGNHWV

SEQ ID NO: 952 - protein, 126 aa, Artificial Sequence
  Description of Artificial Sequence: Synthetic polypeptide
NFMLTQDPAVSVALGQTVRITCQGDSLRSYYASWYQQKPGQAPVLVIYGKNNRPSGIPDRFSGSTSGNSASLTITGAQAEDEADYYCNSRDSSGNHWVFGGGTKVTVLGAAAEQKLISEEDLNGAA

SEQ ID NO: 953 - protein, 291 aa, Artificial Sequence; identical to SEQ ID NO: 865
  Description of Artificial Sequence: Synthetic polypeptide

SEQ ID NO: 954 - protein, 5 aa, Artificial Sequence
  Description of Artificial Sequence: Synthetic peptide
DYYMN

SEQ ID NO: 955 - protein, 19 aa, Artificial Sequence
  Description of Artificial Sequence: Synthetic peptide
LIRNKANGYTTEYNASVKG

SEQ ID NO: 956 - protein, 12 aa, Artificial Sequence
  Description of Artificial Sequence: Synthetic peptide
DSDGYYEYYFDY

SEQ ID NO: 957 - protein, 472 aa, Artificial Sequence [sequence omitted]

SEQ ID NO: 958 - protein, 11 aa, Artificial Sequence
  Description of Artificial Sequence: Synthetic peptide
RASQEISDYLS

SEQ ID NO: 959 - protein, 7 aa, Artificial Sequence
  Description of Artificial Sequence: Synthetic peptide
AASTLDS

SEQ ID NO: 960 - protein, 9 aa, Artificial Sequence
  Description of Artificial Sequence: Synthetic peptide
LQYASYPYT

SEQ ID NO: 961 - protein, 236 aa, Artificial Sequence
  Description of Artificial Sequence: Synthetic polypeptide
MDMRVPAHVFGFLLLWFPGTRCDIQMTQSPSSLSASLGERVSLTCRASQEISDYLSWLQQKPDGTIKRLIFAASTLDSGVPKRFSGSRSGSDFSLSISSLESEDFADYYCLQYASYPYTFGSGTKLEIKRTVAAPSVFIFPPSDEQLKSGTASVVCLLNNFYPREAKVQWKVDNALQSGNSQESVTEQDSKDSTYSLSSTLTLSKADYEKHKVYACEVTHQGLSSPVTKSFNRGEC

SEQ ID NO: 962 - protein, 7 aa, Artificial Sequence
  Description of Artificial Sequence: Synthetic peptide
SGGYYWS

SEQ ID NO: 963 - protein, 16 aa, Artificial Sequence
  Description of Artificial Sequence: Synthetic peptide
YIYYSGSTYYNPSLKS

SEQ ID NO: 964 - protein, 25 aa, Artificial Sequence
  Description of Artificial Sequence: Synthetic peptide
LGPLGYCSSTSCPVTGEYYYYGMDV

SEQ ID NO: 965 - protein, 480 aa, Artificial Sequence
  Description of Artificial Sequence: Synthetic polypeptide
MKHLWFFLLLVAAPRWVLSQVQLQESGPGLVKPSQTLSLTCTVSGGSISSGGYYWSWIRQHPGKGLEWIGYIYYSGSTYYNPSLKSRVTISVDTSKNQFSLKLSSVTAADTAVYYCARDGPLGYCSSTSCPVTGEYYYYGMDVWGQGTTVTVSSASTKGPSVFPLAPCSRSTSESTAALGCLVKDYFPEPVTVSWNSGALTSGVHTFPAVLQSSGLYSLSSVVTVPSSNFGTQTYTCNVDHKPSNTKVDKTVERKCCVECPPCPAPPVAGPSVFLFPPKPKDTLMISRTPEVTCVVVDVSHEDPEVQFNWYVDGVEVHNAKTKPREEQFNSTFRVVSVLTVVHQDWLNGKEYKCKVSNKGLPAPIEKTISKTKGQPREPQVYTLPPSREEMTKNQVSLTCLVKGFYPSDIAVEWESNGQPENNYKTTPPMLDSDGSFFLYSKLTVDKSRWQQGNVFSCSVMHEALHNHYTQKSLSLSPGK

SEQ ID NO: 966 - protein, 12 aa, Artificial Sequence
  Description of Artificial Sequence: Synthetic peptide
RASQSVSNNYLA

SEQ ID NO: 967 - protein, 7 aa, Artificial Sequence
  Description of Artificial Sequence: Synthetic peptide
GASSRAT

SEQ ID NO: 968 - protein, 10 aa, Artificial Sequence
  Description of Artificial Sequence: Synthetic peptide
QQYDISPMYS

SEQ ID NO: 969 - protein, 236 aa, Artificial Sequence
  Description of Artificial Sequence: Synthetic polypeptide
METPAQLLFLLLLWLPDTTGEIVLTQSPGTLSLSPGERATLSCRASQSVSNNYLAWYQQKPGQAPRLLIFGASSRATGIPDRFSGSGSGTDFTLTISRLEPEDFAVYYCQQYDISPMYSFGQGTKLEMKRTVAAPSVFIFPPSDEQLKSGTASVVCLLNNFYPREAKVQWKVDNALQSGNSQESVTEQDSKDSTYSLSSTLTLSKADYEKHKVYACEVTHQGLSSPVTKSFNRGEC

SEQ ID NO: 970 - protein, 10 aa, Artificial Sequence
  Description of Artificial Sequence: Synthetic peptide
GYTFTNYGMN

SEQ ID NO: 971 - protein, 16 aa, Artificial Sequence
  Description of Artificial Sequence: Synthetic peptide
WINTYTGEPTYADAFK

SEQ ID NO: 972 - protein, 9 aa, Artificial Sequence
  Description of Artificial Sequence: Synthetic peptide
DYGDYGMDY

SEQ ID NO: 973 - protein, 137 aa, Artificial Sequence
  Description of Artificial Sequence: Synthetic polypeptide
MAWVWTLLFLMAAAQSAGAQIQLVQSGPEVKKPGETVKISCKASGYTFTNYGMNWVKQAPGKGLKWMGWINTYTGEPTYADAFKGRFAFSLETSASTAYLQINNLKNEDTATYFCARDYGDYGMDYWGQGTSVTVSS

SEQ ID NO: 974 - protein, 15 aa, Artificial Sequence
  Description of Artificial Sequence: Synthetic peptide
RASKSVSTSGYSFMH

SEQ ID NO: 975 - protein, 7 aa, Artificial Sequence
  Description of Artificial Sequence: Synthetic peptide
LASNLES

SEQ ID NO: 976 - protein, 9 aa, Artificial Sequence
  Description of Artificial Sequence: Synthetic peptide
QHSREVPWT

SEQ ID NO: 977 - protein, 132 aa, Artificial Sequence
  Description of Artificial Sequence: Synthetic polypeptide
METDTLLLWVLLLWVPGSTGDIVLTQSPASLAVSLGQRATISCRASKSVSTSGYSFMHWYQQKPGQPPKLLIYLASNLESGVPARFSGSGSGTDFTLNIHPVEEEDAATYYCQHSREVPWTFGGGTKLEIKR

SEQ ID NO: 978 - protein, 27 aa, Artificial Sequence
  Description of Artificial Sequence: Synthetic peptide
YPYDVPDYAYPYDVPDYAYPYDVPDYA

SEQ ID NO: 979 - protein, 30 aa, Artificial Sequence
  Description of Artificial Sequence: Synthetic polypeptide
YPYDVPDYASYPYDVPDYASYPYDVPDYAS

SEQ ID NO: 980 - protein, 24 aa, Artificial Sequence
  Description of Artificial Sequence: Synthetic peptide
DYKDDDDKDYKDDDDKDYKDDDDK

SEQ ID NO: 981 - protein, 30 aa, Artificial Sequence
  Description of Artificial Sequence: Synthetic polypeptide
EQKLISEEDLEQKLISEEDLEQKLISEEDL
